United States Patent Application Publication US 2023/0132042 A1 - sequence listing, part 2

SEQ ID NO: 686 - DNA, 22879 bp, Zea mays
  source 1..22879: mol_type = genomic DNA
caatcaatcatcatcaacccgaatcacaagggacaagtcaaccttgtgttcgcagtcaggtgtcctgtttgcatgatctttgctatatgtaatgaacaaaatttcagatttctagtgaggaacaacagacaactgatgaaccagagttgcaatttcagaaaaaataggctctacttccatagtgcccctggtagccactaatacatgtgctttagctaaaattcactaatatctttgttgtgatgtgttcaacgactatttgtgtattttgaattgaatcttcctaatgctaatccatctcttatgctaggttggatagagcaacaatttctccttgttgcctagcaatgcaagcgatgctacaattatgaagagtcaattatgaagagtcgatgagcgactattcatgttgcctctacaatggaaaaagttcagaacatgcagcaacacaaaaccaagagaggtggtctagccattcaacatttgaaatttgtactcttattagattaataatggtcatctctatcatagctatttagtcggtgcaacactagtactactaattgtgtgtacttttatagtacgagtgttttagctaaaattcattattttttttgttgttgtgatgtgttcaacgactatttgtgtattttgaattgaatcttcctaatactaatccatctcttaggttaggcgggacagagtagcagttttccttgtttgcctagcaatgcaagcgatgttattgttgggggccttcctcttctaaaggtcgtcaaaaacgcggttaaccatttgctttcaatatactattagatattacaagagcttcgtcaccagaaaagcttcgacataacacaagaggagcgaagtgagcttcgtccaacatgcttcatcacggtgaaacagatatacaacatgaggagaaggtgttgctcaagttagtaaatacaaatgacgatactgctcttgtaacattttgcaaactctgtatgtaattgtcgagggcataaatgtaatagcacacaaacttttatagttgcctataaatagatgaacagtaccctcatactgttcacgttggattgtaattgctctcgtgttatcaccttcaaacaagccgaagatatcaatgtaatataaattctaataatatttatatgtttatcatggaataaatatattaatggataaaacaactcatgcatataaactcttatgaaccatgaagacgtgtcatcaatgatcttcgtctggagatcattatatccgagaggagataatatttcaaagacaaatgtccttaatgtttgataatcgtgttgacttgtttttgattcacaatatttgagaacgagacaatatataatatcagtttaaataatctctgatttttatattaaatttaaatttaaagaaaaaaagtcaaatgtttttataaatttgaacgggacaatatataatatcagtttacccttacttatttaagtcatcagtaaggtaaaagtgatctaggtctcccgcgccgccgccgccgccgcctaagctgcttccacctccgctttctgtgcagaggactcctcgccggagaatagccggcggcggctcgagacgaaactacggtgctcgtctcccgccgcccgccgcccttcactccccagcatacctagtccctactctaatccgtacagagcaacgcatcaagtgatggcgaagccggaggagaagctgcgctgcaccaaggaacccttcatcgaggacgtcggcacccggaggatgtaagcatgcggctcgcgtcccgtttaatgaatcgtagctcgacgattacacttactctgccgcttccctgttacgtttggttgcttttgatgtcagaaagagcatccggttcagcgtgctctcgggcagcgagattcgcaagtcagcggaggtacaggtctggaacaaccggatctatgaccgcgacatgacgccggttcccaatgggttgctcgacccgcgaatggtaatgccccgctcggtattgctgtttcgtcatgtgtattttcattgatgatttgaagatgggagttctaacataaacgtgcgtttgtggcatcgttcaagttgttgcaacttatttttcccgtgtcaaatttcagggaatcccgactaagagaggcaaatgcaatacctgccatggtgaatttagtgactgtccaggtcatttcggctacttgaagctcgcgcttccagtttttaacgtgggcttctttaactgtattctggacgtgttgaagtgcatctgcaaggtactgccatgaagaagtttacatcatgggtgggctgaacacttgaactctgacttgttaattattctcgttccctcatgcctttccagagctgtagtagagttcttcttatcgagaaagaccgcagggagtttctaaagaagatgagaaatcccagggcagatgcactacagaaaagtgctacaatgaaaaaagtgagggacaaatgcaaactatcctgctgcccccgttgtgattacagaaatggtaagccatcctatattgtccataataattttaccttgtaatgtcactactgatacctgactgttgtttgtaagctaacatttgcaagaaatcgctcaacagtcaactctttcctgtttttgttgtaaaaacaggtgtagttaaaaaaggcagagcgggcttgatagtagttcatgattgtagcaaagttttggatggacatacagaagaattgaagaatgcactacaaaataagaaagaaaaggtgtctgctagttcagttctagtgttagaccctgcaactgttctatctctattcagaagaatgattgatgaggttggtgccaattttcatccttcaagggtcttaagtgaagaaggaccatttgatgtgttctgctactccctgttttagtgctcaataacactaggacaggcaagtgagctggagaaaacattaaacctatctaacaagttgccccaagccacattggttgcctcacattagatgctattttgcaatttgaacttgtcgcagttttgttgacaaaagtttactcttttttcatttttctgcaggattgtgaattactaaaccttggtgataggccagagaaacttattgtgacagagattgcagtgccacctgttcctatacggccttctgttgttgttggtaatagtagaacaaggtttgccttctatttcttaagagctactatgtttatcctcattttagtttggtgattcagaataaccttgtgatcatgagttgccttgcttattgcagcaacgaagacagcattacagttattttgaagagcattgttaatacaaactccatccttaaggagacccttcatactgggggtccattcaccaagtgctttgtaagataacccaaagctcctcacttgtctgtttttacatgtgtctgaaaatttccattcatctgtcctttttttcatagatgtgctcttccatattttattttttggatcgtttttagttttatccacaaactatttgatgtcaagggcgtcgagcccccgactagccggaccgtggctacgcagctcgtagccatctgtcgtcctctccagtgaggttatccccccctcaaccgcaggtttaacacacacagagagagattaaggatataattcttccttaattgattgtcaagcgattacaagcatatatagccaatggcccaaccgaaatggagaaggctctccttgattctagggatttccaaaactctccttgattctagggattttcaaaacaacttactaatctaagtttatatctttagccactagaggctaacccaccacttcccttctttttgatttcccttctatttagatatgatatagacctaattcttatacaaagaaaactctttcgcttcactttgtctcactttctctagaatctctagaaaaaagaattgctctaccctttatttaatgatagtcagagactattaaataaaaaagaaaatacttactactaattggattagaacctgcccagcgtgatcagttgtgcgacgcacgttgcgggcgcgtctgtgcctggcatatgtgcgtccgcacatgacatctctccctgcttcgaagtccagctcgtcctcgagctgaaaggaagggaactgagcacagaggtcgtccagatcctcccatgtagccgaaacaggtggttcgccctgccattcaacgagcacctggcgcacttcccaggccagccgagtttgagtcaccctggcaggtgcaggcaccacaacactgtgcaggagcgaaggcaacaacggtggaacgaccggtgggttaccgacaaacttattgaggacgccgacatggaacacatcatgaaggcgagcgcagggaggaagctgtagctgcaccgccacctcgttgatgagctccgccacctggtacaacccgacatatcgcggtttgagcttccctgttgccgagtgtgggagggatgctgctgcctgctgccgaaggcgaagaagagcccaatcgccgacctggaaggacatcggcctgtgctggtcgtagacgcgcttctggactgcctgtgcctgttcaaggcgatagcggatgtcgtcgaggaaggcaacgcgctcctccatctcatgggcgatcgctgtgacgcgggtctcgccgcgctcataagagcggatggtcagggggtcccgaccatagaccacacgaaacggagtttcgcagagcgatgattgataggtggtgttgtaggtgtactccgcccatggcagccaacagagccactgccgggggcggtcgccggtgaagcagcgcaaatacatgacgatgacctggttggcggcctcggtctgcgggtgaaaggcgaacgacttgtagagcttcgtaccagtgagccgcatgagttcctgccagaacgtcgaggtgaacactggatcgcggtccgagacgatggaatgtggaacaccatggaggcgaacggtgtcgacgaagaaggcgtgagcgatggactcggtgtaggggtgcgccaaggggatgaaatgacagtacttgctgaagcgatccacgacggagaggatgaccgtcttgccttgcaccttgggcagcgccgcgatgaagtcgatgccgatgtcagcccacacagcagacggaaccggcagtggcagcagcagaccgactggcctgaggtggtcgaacttgtactgttgataggtgacgcatgccttcatgaaatcctgcaccaagcgacacatgttgggaaaatgaaaatcccgccggagcctgtggagggtgcggtggatgccctcgtgaccgtcgttgtgggccgcgaccaagacctcctgcagcagcggcgacgccgggggaatgtacagacagtcgtcaaaggcgaccatgccgtccaccggcgcccatggagcggcacgggtgccagcccgcacctcatcgtggatggcgaccagggtcggatcagtggcctgggcgtggcagaggcgcttgatgaagtcaaagcggggcgctgaaatagccatcacctcccctacgtcattgtcgagacgggagagggcgtcagtgacgacgttcgtggcgctcgaccggtactccactgagaaatcgaagcccaggagcttgccgacccagtggtgctgagggatcgtggcgaggcgctgatcgaggaagatgagcttgcgctgatcgaggacgggagtgggcgtcggcgacgacgttcaggctgtagtggttggttttgacgatgaagcgccgcccccagagatacgggcgctagtgccttaccgcatggacgaggccgatgagctcgcgctcgtaggcggctagcgagcggtggcgcaacgccacaagcctgctgaagaaggcgaccagatggccctcctggaccaggaccgcgccgaagccgaacgacgacgtgtcgcactcgacggtgaacaacttggcgaagtcgggcatggcgaggacgggggcggacgtgatggcggccttgagcgctgtgaatgccttggtcgtcgcgttgtcctaggtgaatccctcctcgagtagggccgttagtggtgcagcgatcgccccgtagttgtggacgaacttgcggtagtacccgtcgaggtcgaggaaatcgagcacggtccggggcgaacgtggagccagccaatcatggatcgcctgcaccttggccgggtccatggccacgcccgccgcagatatgacatggccgaggtaggcgacggtggaagcaccaaaagagcacttggtgcgcttgatgaagagttggtggcggcgtagttcgtcgaggacgttccggaggtggcgaagatgatcaacccacgtcttgctgtaaatcagaatatcgtcaaaaaataccaggacgaaacgacgcaggaacgggcggagcacgtcgttcatcaaggcctggaatgtcgccggggcgttgcacagctcgaacgccatcacaggaactcgtacaggccgtcgtgggtgcagaacgccttcttgtgcacatcctccgggcgcatgcgcacctggtggtacccggaccggaggtccagtttggtgaagaacttggcgccatggagcttgtcgaggagctcatcgaccaccgggatcgggaaagcattcttgacggtgagcgcgttcagcgctcggtagtcgacacagaagcgccacaaaccatcaggcttcttgacggggaggacgagcgacgagaacgctgagtcgctgcggcggacgatcccttgatcaatcatggctgcacactgccgctccaactcgtccttgtgcgccgcggggtaccggtaagggcggacgataaccgtctgggcgtcgggctagagaataatacgacggtcgtgcgcacacttgggggcagaccgacggggttcgcgaagagcccaaaaaacaaaagcagcagcgcctccaagaggggaccaacctctgttgttgcgcccagggccggcacagaggggctggccacgccggtgcaggagacggggcgcccctggcgctggaaggtcatgcgccggcggctgaggtcccaaacaatgggcccaacttgccgagccatcgggtgccgaggacgacgtcgtacccggcaggtggcatgacgttgaggttggccggaaacgaatcaccgtcgatgagcaggggcgcgtcgcggatgacgccgacgcaggtgacccgctcgccattggcgaccaaggctatgaggcgggggcgttggcggaggggtagaccggagcgccgcgccgcctcccccgagatgaagttgtgcgtactgccggagtcgaggagggcgacgagggacgcgacgcctagtgccacgacgatctgcatggtgcccgccatgggaaccatagccatggcctgcaggaaaaaacagggcgcctcagcgttgtgctccgcgttgccagcggcgttcgcgacatcctcgatctccacgccttcaaggaagaagatgcgccgacagaacctaatatggacacgagtatatttttcattgcaattaaaacagaggccccgacggcgtcgttctgccatctcgtccggggtgaggcgcctctggttgccctcgccgcatccctgctggccggccaccgggaggggcagggagcgccattggctgctgggcgtcaggagcgctggccggggcgcgggaacgggtaggagtccgcgcgcgagcgcccgagggggaggctgcaccgggcggtcgatctccatcaactccacttggcgcgccaggcacatggcggccgtgagcgtctccgggttgtggatgcggacgacgtggctgagcggtgacaggagtccaccggtgaagagttggacgcgctgcgcctcatcaagacgacccgcgcgaggtaggagggcctggaagcgattggagtactccacggtccctgtacgccgacactcggtgagctcgaacagcggggccgagcggaggggaggcccaaaccgcaagttcaggagctccttgaatcgcccgtcctcctggagttggatgtaccagagttgcgcgacgacctccaaattgtacgaggccatccacacgcgcttctctgccaaggtgcgctgttggcgaaaataggattcacacttgttgatgaagagcatcggtcttggcgtcgtagcggggaaaatccaaattttggaattttgggggacgatcaagatcgcgcggcccctccgggcggctgcttgcgccgctgttcgacaacgaggccgacttctccttcatagcctccatgtcggccttcatggttttcatctccgtggtgatggatttcaacatctccatcacatcggcgatggtgggatcgctcatgtctgctggctgcggtgcaaaagcgttggaggactgcggcgatggtggagggctagggtggtgggcggaggctgtggaagaatgggtgggagcgggtgggagaggaccgacgtgaccgtgatactaggttgtcaagggcgtcgaacccctgactagccggaccgtggctacgcagctcgtagccgtcggcggtcctctccgatgaggttatccccctcaaccgcaggtttaacagagagagagaataaggatataattcttccttaattgattgtcaagtgattacaagcatatatagccaatggcccaaccgaaatggagaaggctctccttgattctagggatttccaaaacaactctccttgattctagggatttccaaaacaacttactaatcttagtttctatctttagccactagaggctaacccatgcagcgcctacccaacgcgctcagccgcgcggcgcacgtcgcgggcgcgtccgcgcctggcatatgtgcgtccgcacatgacatttgacttttggttgcttgtaaagtgctattcctggaaataagttgtacagtacatacatgaagttatggcatttatgattagcacatgtgattattaactagaaatctgaagtccaagttttctaatactgcgtttggatggtggtattgaggcccagattttggaattggaattggtattggtaaagtcgaattccagcgtttggatgttcacggaattcggaactggaaatccatcccaattcccctggtattcaactacacctgcaccccctccccttcaataccgagcccccacctcagttttgatcagaattcaactacaccggcatctaaacaacaacattggtattgcagatcaattccatttctcctcagatttggtattcctagaccaattcaattccaccacgtgaatgcctacatccaaacggagtataaatatattaacgagctgaaataataaattggaaacttgtgcaaatattggacaataacctgtagctacttgcctacttcaaacttcacactatttctggctacattaaacttagttgatgattctgatctttaaaatggcgggggtcatattttcagatgcttcattttcaatctggataattgattcatcagactgtaacttttgtttatgtccttagctaacttttcactcttctaggattgctggcaataccttcaacttcaagttgttgaatatgtgaatagtgatgccccttctcttcctgagtcacaacatcggggccttgttcaacgactcaaagggaagactggacgatttcgtggcaatttgtccggaaaacgtactgagtacacaggaagaaccgtcatatctcctgatccaaatttgaaaataacagaggtacctgttcatgttcaattgtttccttatttctcactttccaattgccttttcatgtcacaatttattagtacttcaggtggctattcctgtgttgatggctcgagtcttgacttatcctgaaagggtttcaaactataacattgagaagctgagacaatgtatacgaaatggaccattcaaatatccaggggctaattttgttacacaacctgatggcatgaagcagtaagttctaacttgacgaacttctgaattgttatccagctcagcttcttctatcatccttatgccttttcaggagcttaaagtatggtgatagaaggattactgctcgggatttaaagtgtggatgtatagttgaaagacatttagaagatggagatgttgtcctctttaatagacagccgagcctgcatagaatgtcaattatgtgtcacagggtatcaatgtctccttatttcataaaagtatacatcaagcatttcttcacctttgaatatttgcttttatacttgagcacaggcaaggataatgccatggagaacactcagatttaatgagtctgtttgcaacccttacaatgctgattttgacggagatgaaatgaatttgcatgtccctcagacagaggaagctcgcactgaagcgcttatgctcatgggggtagcatttgctttccttctttcttaagttgaacaaactcacttttatgtgctaacacctagcacatctttgatagctgatattttttatttttatttcttttacaggttcagaataatttatgtactcctaagaatggtgagatactggttgcttccacgcaagacttcttgacctcatctttcctagttacaagaaaagatactttctatgatagatcttcctttactcttttgtgctcataccttggtgatggaatggagaacattgatttgccaacaccagccttgattaaagtaagattttcatactgagttttttgtttggtcatatctggaatgttatgctaattcttcttctagggatgcctatagttagaatagtcgataacttgatatcattttactatgataattaaggtgcttactattatgttttgtaaatcaaatttcagcgtttgcatataataagaaaacatatcaaaatgcattttgtttatttcctaaatgaaatctatgcacttgcctttactcttttcattagcatgcatcttagtacacactcttgtttatactgagatacccatatcttatgtgtattctatttttgcagcctgttgagctttggactggtaaacaactatttagtgtgttagtccgacctaatgcgcacacaaaggtgtttctgaatcttgctgttcaagaaaaaatttattcaaagaaaaagggaaaaaaagaggggggagaggaggtaaaggaaacaatgtgtggaagggaaacaatgtgtcccaatgatggttatgtttatttccgaaatagtgaactgttatctggacaagtagggaaggccactttaggtaattattagaaagaatatgcaattttatcagttattactaaatattctgttccttagttcctataatttatgggcatctgttatttatgttttacatgaagatttgggaacaataaaaaatgatgaagcctttgtcttcaggtaatgggaacaaggatggcctttactctgttcttttaagagattataattctcatgctgcagcaagctgtatgaatcgtttggcaaaatttaggtgagacacattccatgctctgtgtaatcacatcattgatgttactttatgtgaaaggtggttcttttatcgataaactcctccatgtgatattcttgggattccttatatgccactgatgtcttgtggcatgtaacacattggaaatgtacaatgtaaggttgttctatagatgcattaggagatagagaatacacgctacatcagatatcgtcttttgtaggagctgtcacctaccatggaaatacctttgtaagccttaaacctagcagtctaattaattgtctcttggtctcaacaacatagatgaaacacatttcagttacctttgctgctcttttttctctcgaaatgcgcaggagaactgcgccccattatatattaagaagaatatagaaaaaggtctaaagaagaccacgaacaaacagcttccttacggaggccagtagctagcatacataaaagaatccatcagagaaaacaaaagaacaccctagaaatcagctaatggggcagccagagaacataggccttttgccccagctgtttcccaacgacttctctccccatcagcagatgccaggattgaggttagacttggagtcctcccatcgaagacacatctatttcgatgattctatattgtccatgcacctaggatgataagggagtcaaggcctttttagtaaggccattgacaacatctgaatcctcttcccaccatctcatgaggaggtgacagccggctgaggggcaagggagtgcagcccaaattttctcagaagctgatactagaaaattcttgaaaaagaacaagccacaagatggtccaaagtttctgcctcttggtcacataaaggacatttgtcagggtggtttagacctcttttagctaatctatcaactgtccagcatttattttgagcaacaagccagatgaaaaaacgacactttagcggggcccgtgttttccacactcatttatagtgcccaaaagaaactaatcccgggaacaatccactataagcagatttttcagagtaaattccatctggagcaatgctgaaaatatgcctgtcttcagttccaggttgcagctcaaaaactgaagaaatcccagagctgtaggtaatcagtcaatacaccaactgagggagccccttttatatcaacaatccaattcctatttgtaattgcttcttgcacagtcctgctattaacaatccgctttggaattacagcaaagagtcttggagcaaggtctgctattcttttaccgtgtaaccacttgtctttccagaatttggtattggtcccatccccaacttcagtgaacacaacctcatcaaaggaagctctagccttttttggaacatgaatggggagaccaaaccagggccttgaggggtcggttttgagcagccaaagccatctcattcggagggcccaacaaagttctggtaaactggagatacccagccctccaagctgaagggggaggcgaacctttccccatgccacaaggcagtgaccaccttttgcctcttttcggcctcttcaaagaaatcctttttctaattatgtcaatggcatctaaaccccattgggtgatgtccactgccattgccagataaacagtcatgctggtaaggacgtgctggacttggacccttctccctgctcgtgttaataagtctgccttccaatttggaagctgatcagcaattctgtcaacaattggctggaactgctgcctagataacttgtgtaaggatagaggaagtcccaaatagcgacaatgaaaggaagatatttcacaaggcagcagcacatgagtttccaacatgtcctcctcagagcaatggacccagcaagttcctgcacttgcatgcattggcttcctctgtggtgtgggaagctattaactgatggtaagcgccacacttgttagtgtcttgaggagccaagaaatttctgtggcatgaactctcaattcacgtcgatacattttatcccatttttgtattcaagagagctaataggtttcttaggccatagttattaaggtgtcgcctaagcgtcactaaagcgatgcttaggcggtaaggcgagcttgacacgcaaggcgtcccatcgccttgtcaactagagtaaggcacgggaaggcaggaggaggtgcacaacacgcagagcgcggcggaggtcgtggcggcagcgcacagggctcctgctatcggaggagggagagctgcggtggaggaaccgagggagaggggagctgcgggggaagtgagagagagagagaggagagctgcggggtgagggagagaggcagttctggtgctggcgctaggttgctggcggctgatgtgagttttatcctaaaactgtattgggctgagttaaaactgtgttgggctgagctgggcttattgtgagcttctttctttttcttttttcctgcttctactaggctgaaattgggcctactagaccttataaaagtgctagcttgcttattaactttaaattaatgatatataaataatattttgatctattttttatatttatctatataactaaggtgaagcctcgccttacgctttatcacctaaaagataaaaagggggtcagtcgccttactgccttgataactatggcttaggccaagttagctaaccctacactgtatcggcctcactgcatgttatttataaacatcacatatgtaccacattgtttcaaattagtgcatggaaactgtattctggtctgaaggtgcttttccccctctgcagtgcaagatttatagggaaccatggtttttccattggtgtggacgatgtccaaccaggagaacatctaaatcggcaaaagaaaaaggaaatagacggagggtacaaaaaatgccatgatcttatttctttgtttgcgaaaggcgcgctcgcattgcatcctggttgcaacgcagcccaaacgctggagcataacatcactggtgtgttaaatgaaatcagatcaattgctggaaatgtaagtttgcacatagtttcataacatccctgatctgattgatcctctttgctctgtttgtttttacagttaggtagaacataattgtcattcataatcataagtgttctcatgcctatcatgttggatattatttttgaaatgcgtctctgtagtgttacttgagtaaggttccttgttgagacattattattgcgttagtttgtagcatcacaattcagtgaacagggttgatgtagtgattttgccaggtgactagtgactgtgtccactctgaatttggtatgctttttagcggatcgttgaatttcttgtgatgaaacttttttcaggtgtgcatggatacgcttcactggaggaacagcccattgattatgtctcagtgtggttccaaaggttctccaatcaatatcagtcagatggttgcatgtgttggacagcaatcagttggagggcgtcgtgccccagatggttttctaaacagaactcttcctcactttcctataaattcaaagacccctgcagtaagtgacaaaaagaaacatggcttgctaatttgtgcatagatatttctagttctatttgaatgaataacaacaacaaagccttttaatcccaagcaagttagggtagcctagagttgaaacccaacagaagctacaagtcaaggttcaagcgcgtagatagctgttttctatccacttctatttaaggctaaatctttcttattcaaggctaagtttttggatatattccattctttcaagtcttctttaaccgtttgttcctgaaagcagatgaactgctgaatattgattgatgatatgagggttaaaggttacatatatatagggaggagatctgtgtggtttatggaaacagaaccaatcatgatctcctcacatctctagctatagaaacataaccaatcagggtctctagctatagaaacataaccaatcaggatcccctcatatctctacatatctctagctgtcctaatcagaaccaatcagcagatggctgtccttatgtggctgatagggacagagatggcgccagcctgtagggactgcctgcatggcgcagtcaagactgctaacacccccccgcagtcggagcgtcgaaagcctggacgttcagactggaccggaactcagtgaacaatgaagatggcaggcctttggtgaagatgtcggcgtactgggaagtggtagggacgtgaagaacacgaatagtaccaagagcaaccccgctcgcggacaaagtgaagatcaatctcaatgtgcttcgtgcactgatgctgaaccggattagaggacatgtagacagtgctgatgttgtcacagtaaaccaatgcagcgcgctgcagaggagcatgcagctctagaagaagctggcgcaaccaggtagcttcggcaacagcgttagcgacagcacgatattcagcctcggcactggagcgggagacagtgttctgtcgcttggaagaccaggagataagactgtctcctaggaacacagcgtagcccgaggtagacctgcgtgtatctggacaaccagcccaatcagcatcagagtagaccaccaactcagtttgcgcagaggggcgaagtaacaatccgaggtggagagtgccacgaacataacgaagaatccgtttcagagcagcgaggtggggctcgcggggatcatgcatatgaaggcagacctgctgaacagcataagcaatatctggtcgagtgaaagtcaggtactggagagcccctgccaaactgcgaaaatccgtaggatcagtgactggagtaccatctgtgcctgagagcttgggatttacatcgacaggagtggagcaaggcttgcattcggccatgccagcgcgagtcagaatgtcaaccatgtactgccgctgagagaggaacaggccactcggagtgcgctgaacctgcatccccaaaaagtgatgaagctcgccgagatccttcatggaaaactcctgctgaagagttccaatgatgcgccgtaggagggctgtggatgaggctgtgagcacaatgtcatcaacatagagcaggagatacaccaagtcagtgccgcgacagtagacaaacagagatgtgtcagatttagcctccacaaaaccaagtgagagcagaaacgaggcaaaccggctgtaccaggcgcggggcgcctgtttgagaccatataaagaacgattcaaccggcagacgaagtcggggtgagctgaatctgtaaaaccagaaggctgggagcaatatactgtttctgacagagtgccatgaagaaatgcattcttgacgtcgagctgatgaacaggccagttgcgagacagtgcaagagtcaacacagtgcgcactgtagcaggcttcacaaccggactgaaggtctcgtcaaaatcaatgccaggacgctgtgagaaacctcgaagaacccaacgagccttgtacctctcaagagaaccatcagcatggaacttgtgcttgaaaacccacttgccggagacaatattggcagccggaggacgaggaacaagatcccaagtgttgttccccaagagagccgagaactcctcttccatggcctggcgccagtgaggatcagcaagagcagctcgataggtccgtggcacaggtgagagttgtgctgcgtgaaatagagctggctgtcgaaaccccagttttgctcgagtagtcatgcggtgatggttgacgaccgggggaacaggaacagcgccgggtgggagctgagatgcggctgctgaaggcgaagaagcagcaacaggcgtcggtgcagcgggtgcagcaacgggcgttgttgcagcaggcgcctgcggtgaaggagtagcatcagcagtcggagctggcgcagaacgacgagtgtagacgaatccgtcgaagcgtcgagggccgggacccggctgggtatccggggcgcggtcggcaacgactgcaggtgcagcgtcgtttgtccgggcggagccaggatcaggtgtaggtgcggcggtaggcaggggcagcagctggtcgttggagcacggactgctgactgctgctacaggggccgcacgtggctgtgcgggagcgtctgttatacctgcaggaaggagacagaaacgtgctgatccaataggagcaggcacggcagggtgagaatctaagagaaactcgaaatcctcggcagtgggtgtggatgactgttcggcaaagggaaaagaagtctcatcaaagactatgtgccgagatatgatgatcttgttggagtgaatatcgaggcatcgatatcctttgtgatgatcagaataaccaaggaagacacacaaaacagaacgaggagcaagtttgtggggggaagtggctaacaagttaggatagcatttgcaaccaaagacacgaagatgatcatagactggagctgtaccgaagagggcttggtgaggggtggaaaaacgaagtgtcttggttggcaaaatgttgagaagacgagctgcgccgtttggctgcgaacgcccgcccttcttcccagcacgtttgccccgtgactgctggtgcggctgctgcttcggcttggagttgttcggcgacgccttaggtggtccggaggcgagcagagcggtggccgatgtcgaggagtgatgtgccaaggtaagttcctcgaggagaagatcgtttcgtacctccaagaaggtaggaagaggccgcccgcgtcgaagatgaagaccgatgctgctgaaacgttcgttgaggccgcggatgacgttgaggacgagagtgcggtcgggaacgggctcaccaagatcaccgagggcatcggccatccctttgaacttgcgacagtagtcggtgatggagagatcgccttggcggaagttgcgaaactccgcgtcgaggaagagagctcgagtctcccggttcccgaggaactgggattctatggcgagccacgcggcgcgggcggagacatcgcgaatgagaacggcgtcggctagctcggtggtgatggtgccgacgatccaagacttgacgacgcaatccatccgcacccaatctggagagaagggtgcgtagtcgtcggtgagaacgtggccttccagggagtacttgccgacggcgagcaggaaggcgtcgcgccaccgggtgtagagggtggacgacacgtcgaggaggacgggaatgatagccctgatgttctgaactgcaaccgcctgagcgtgcagattgatgagcgcagcggcttcatgaaggagaagagcttcacgcgtgcgagcgtcaggagcgtcgtcacgaatggtggaggcgtcgtcgttgttgacctcctcgtccaaaggatcagcagcggcgcgggcctgggcggcccgggcgagagcgtcgcggatgcgggcggcggccgcgtcgcgctccttggtggcctcagccgcctcgcgttcagcattgcgggcacgcgcaagggcgagctcgcgagtttgaagacgagcagccctctcctgctgcgcgcgcagagcagcctctgccgcagcagcgtcgtcgactctgggagaagggggctggtggctagccatggacggcgcgcaggagcagcagccgtagcagcgtcgggtgggcgcgctagacagcggaaggtgagtagaaatgaacctagactcgtgataccatgaaagcagatgaactgctgaatattgattgatgatatgagggttaaaggttacatatatatagggaggagatctgtgtggtttatggaaacagaaccaatcatgatctcctcacatctctagctatagaaacataaccaatcagggtctctagctatagaaacataaccaatcaggatcccctcatatctctacatatctctagctgtcctaatcagaaccaatcagcagatggctgtccttatgtggctgatagggacagagatggcgccagcctgtagggactgcctgcatggcgcagtcaagactgctaacagttcccatgtcaacttcggtctttgcctgcctctctttacattactttcgcgtcttaggatcccactacgcacttgtgcctttggaggtctttgttggacatgtccaaaccatcttaaccattgttggacaagcttttctttaattagtggtatccctagcctatcacgtatatcatcattccgaacttgatcccttgtatggccacaaatccaacgtaacacacatttccatagcacttaaaatagttggttgtcaagagtcaagctcagctcaccagctccaacaatggcagcctttaccatcagacaggaaagaatgcttttggataaacaaattctgcaaatttgttaccatcattgggctgaatgactgcatatagcacatcttctacagcgcttatcgaaaagtgcagatataatagtagctttagttttcgtttctcaattcccatgtaccacagccatcaaacttttctgagtgattgcatgattgttggtttgttgaatctggtggttttaccacagtaaacgatagagaaactggagcttttgggaagttatgctttttaaaataataccacccttctgtatttctattttctgacatcaatgaatctgccatttttactttataatttcaaaatgaagtagatatttaaatttgttaacacaaaaacattctgataaggttttgtcttccatttgcaggctaaaggttttgttgctaattcattctatactggtttgactgctactgagtttttcttccacacaatgggtggacgagaaggtcttgttgacacggcggtatgcctaaatttaaacatgtttctttcttgcatcaatgtttttgagtcgtgaagtcgagtcgagtcgagtcgtgtagctactgactagtagactagtgatgactaggatagactactcgtgactagttgaatataagtcgatgattacatttttataattttctatatatgctaatactaaaaacacactgaaacactaaaaaacacctcgtttagtgtatcttcatcaatctccatcttctacaatacatcattaaatattgaacagtcttgtagcaagtctcctattgtgctctctgatttcaaagaacttgtttgcattcaaaaacagtgcatgcctcatacagattggtattcatctgattgtcccacctcttatcttatcaacaatagaaattacttcatccattaatcgctgtgttccaaagcttccttgatgctcttttttgcattgtccatggcaacctgcatttcagccattgctggtcctaccatttcagcctaacaagatctctaccatttgtcttggtcctcaccaagtcttaaatccttccatgcccatagataaatctggttatcttctttgctttagcaatgcagccactaaactcatttatcttcccaataacctccagcatgagatccaagtagtggttagcacaagatgtccaaaataaggtaggaaacttgtccattagcatcctacctactagggttgaaatggttgggcgggcttacatttttatacctaggtccaaataagtcgcacgattcaaatgctacgactagtcgtgactagtcgacaagtcgagcgactagcagagtaagtcgagtcgttctggtcgactatcacctctacaccgacttctcgactagtcattctcgactagtctctcgactttaaaaccttgttttgtatttattaagtttttgcattctctagggattacatcataaatgatgtcacaattgttcatataggcttaaatatgacttgcatttgttactcagttgaaacagacaatggtgtcattttgttttcctggccaaaatgtttgccactatggatggtactcctctgctccgaagtgtaatttttttagttttgtcttaagccaaacttcttgaccaagtttatagaaaagtgcatcaacatctacacatcacattaaacagtgtatttatttggtactatgatgttaatatatctttttttctgcaaactttgtcaaagttagggaagtttgacttataacaatgctaaaatggccgacatttttttggaatggaggaaatatttcttttgttttctcacatgagccaatacctttttttttatcgactgctaattacaaccttcctccccaatctgattatggtcctggtatatgtacaaactccctaatgatctaattctgagcattattaaataccacaattcggtatattttagtagttctactattcaatcctaatggcccaatctaataacttgatcctaacaactgttacagactcacattgaaggaaaagagtaacccagttttctctgaagccgagatgtaattagataaatcattactcccctgacacctggcatacaacaccacttgttttctaagacttgctgcaagataatgcaacattcaacctaagagactgacaaccatgtattagttacttcggaacagcaatagatcaagtcaataactacaaagtggctattacagagcagtattatatcttcaagtagaatttaaagagaatcccattgatctcaccagtgttatactgttactacataatcatctgcactagacctcgtatcctcagaacagtgccaacatctatttccagtgcattttttcccattcaaaatttttagtcggcccctacctgttgtttccttcgttttgatcttttcttaatattaggtcaaaacagcagaaactggatatatgtcccgcagattgatgaaaggcttggaagatctctcagttttctatgatcagacagttcgaaatgctagcggtggtatagttcaatttttgtatggagatgatggcatggatcctgcaaagatggaaggaaaagatggcatgcccttaaatttggatcaattgtttatgaaagtcatggttagtttaatgtacataatactttgttagatagccatgaaaatgtgctctgatcatttaacttctattataggccacatgtcctcaaaggggatcagatacattatctccagtgggcatcaaacagatgttagaggataagttcttgcagcatgacacctcatctgatggtggctgtagtgcagagttcaagaaaaacttaactgaattccttgataaacgtatagaattaatgaaatgcacaagaagggcactccatctacatgaggatcatgtagaaaagaaagattcttgcctagaagaatctattgctgctattatatctggtatatctgcaaaacaacttcaggtgcgtgtttataatcttttgtaaccctttctattatcaaag

SEQ ID NO: 687 - DNA, 93560 bp, Zea mays
  source 1..93560: mol_type = genomic DNA
caaagtgcacacgaaagattcgtgttggtctgtgaggacgatatatgatcctagagagctgccaggagtaagtaccgccggtctgggagtggacggggtgttacattctgctcctcttcctcctcgccgacgacaggttctctctgcagaggtctcgctcacagtggcgggaggccatccacgcatgtgagcaggccttggtgctcgacatcgtcatgctcctcttcctccttgtcggcgacacggttctcgccggagatatggcgctcacggtggcggggttggcgacgctcaggtccttgttgctcgtagaggagatggcacacaaatcaaccgttgtcaagataggaaggtagatgcgagccgcccaggcagtcaccgggcccggggcctgccagcgtatttttaaaattgggctaatgaacgccactgagcggcgaggagcccatgcagtcaccgctcaggtccttaatgggctaatgaatgaatgaaactttatctctttttgtgggctgcttcatcattacgactaatggacatgaacggcgaggagcccaggcagtcaccaggcccggggcctgccagcgtatttttaaaactggttaaaactggttgtttggttacttcccaagtttgtcatggtgatgtcttttaaacagagagtgagtatggtgatgtcttgaatggaatatatggaattatggatgctttgatatttgggtgtatccctgatattgtttcttccatataacctgtattatgttggctttatgtcctgttatcttatctatgaaggcatttattgttttcttcttcgagaacgtggtgtgcatgtgtttcattaagaggagatgaagggacctgaaaagaatacagcagattacaactaagatacagtacagtactacagtgtgtaaagtgtcccgacaagacaaaaaaagggtgggtgttggttagttgttacagggcataagttgacccaactaaaacaaacatcgaagaaatgaaaccgccaaattagagggcatctggtggtaccaaatttccattttagtgttgtgccctccccctcctaataggtttcatggagggatcttgtgatcctttaagtatttgaaatgctgtgtagtgtagcctgcaaacagcaaaacacactaggacactctacacggttgcattgttagggctagtttgggaaccccaagggaaattagttcattttcccttggaaaaataggaatcccttgggaaattggagttcccaaactagcccttagagtgagatttctcatttaaagactagttctatcatcattatggagtatccttttgtctttactttttcattagtactaattatatatggattaaaataactgtatttcagtgtaatattcagagctatgtctgtttacactaatattcttggtgtgttattccttctgtctggtttctacttctgtcggcatgaattatttttctatgggactcctgtgcaggatggagctacatcgtgaacctcctgaagctattctgaatgccataaaatttgatctcatgacgagtacggatatggtatgcctttaatttcacacaacttctacccccaactaaattgttgagcatcattacacttttatacttttctttctcttttttgtgaacagaagctttctacaacttgtactatatgcttctggtcatctatgcaaatgcttactttcttatcaagtcagcacatagagtaatttgattattctattcattacattgtattgtcagagataacttttatgcaactattaaccatttcaggaaaaattgagcagcatgagcataatcgaagtgagtgatgtcactagtccgaagctaggattaccaaatggttccctgcagtgtgagacttgtggatcacaacgtggacgcgactgtgatggtgagcactattaagcatgcttacctaaaaatataatattaagcatgcagcatctaagcatctgctttgagtgcatttttgtgcaaagagaatcaacttgtcaaaacttttagggcattttggtgtgactaaactggcggcaacagtacacaatccatacttcatcgatgacgttgttcactttctaaaccgaatatgtcctggctgtctcagcccaagggaaggcatagatacaaaggtttgtaccttcctgactgacctattttttatccccattaagcactacatgttttgtctctttgccaaagttctttgattgataccataatttagtcaatgaattgctttcagattatctggccattttgtcaggagctctctttgttcatctgatgaactaaagtaacgcttgagagtccttgactgctaaaacaaatttcagtattactacatgttattgtgctatacattgatgagtttgtttgctgcatgttaccttacctcatataatcctttacttatttatttcagtaggtattgatacacacgaaaacagtataatgctttttgaagaaaattgtgtatattagtttgattcttactagcttagtgagctattattctctttgttgtttcttatgttagtcatcttgtcctgaaattaaatataatattgtagtcgtggttgcatcaaagtttaattcacaagccatttatatagtttgtgagttgaactagttaatcatgcagtcgaattaactctaactgattttttttaaatagagcttaggcatggtaaatttacataattgcctagttcacttatggactaagtgatgttgttcaactgtttacaagtgattttaagtgttatatccaatttgtaacatatggaagcacatggctaacagtagcgtcctggctcagtttacttttgttttggtaggtaatggtgtgtttattcccacagtttgctcttcatgttttgcctattttttgtatgtggtatagtagggtactttttttccccttcattgtatatgtttagttttcctcttgtgtaaccctgcttctggtattccaagggttgctcctttagggaaagtagtgacaaactagtgtttatccatgatattatgcctactgcattttcttatcatggttttatcgattcctaaaactagtagaggtgctcttgttacgacactaatgtttacacatccataatgagtaaatgacccaatggtccactgttaagtaaaaaccacacctttctcttataaatcactctttgctttattgattgaagagattggagagagaaaaggttcaagcaacatgcaagtattgttcggtaagtgcatgtttagttctattggtgcatatttctcccaccttgtattaaattttaaatcttctgtattttttgctggacagaaggatggctctaaactttaccctagcatagtctttaagacactgtcaagtccaagagtattattattcaagagtaaacttcacagaaacgccagcgtgatggaaagaatttcgattgttgcagaagctgctgacagaatgcctaatagatcaaagggtaaaggttcgcttgaaggcctgcccctggatttttgggattttgtaccttctgagaataaacaagtccagtcaaatatgaccaagataatattgtcgccctaccaagtaatgttttttttcagctatccatctttggtagaggctgttccatgttggtttccagtatatagatatactaattcactgtttttaccctgagaaaaggctgtttttttctattattttcaattgggtcactgctactcttgctcgagtagtagtagtagcctagtgatttaaaatgtacacttttgtttctcaaaccatgagagctgcatgtcatttcattaatggtaaaacggtctgattacatgccaaatccatggtttggttaacactcgcccccttatacatatggaaacacaacctctgctgctcagttgccttgtaacaagattagctgcttatctctagccaaggtccacaggtgcccttgttgtctcacctcgtgaagcaatgcctccgccgatggtttgaggccgtgtaagatacatcggttcctatgcttccagagcatccaagtaaggagaatgaccaaagtgttgaaacccttcctcgccgccttaggcgttcgccggatgcccttcgccaccaatcctagaaggcatcgtcgccctatgacaatgcaagggcatgtaggctgactcgatgtagacctgtgtgccaaacctgacgtgagaacacacaagaggttaagatgtgaaaggaaaaggggacataaatggggacatgggattacccattccatttggagtatttttttattgaatattctttccaattattgaatattctttccaattacttacaacatatggaaaatataactgggattaccaaacaagggcaatctgctccttgtatcacatatatatcatgtttcaaacactaagaccattcttgtttcatttgccatatttgcaggtcttctacatgttgaagaaaagtgaccctgaacttatcaaacaatttgtttcaaggcgggagctattgtttctatcatgtttaccagtaactcctaattgccatcgtgttgtagaaattggatatgggcttccagatggacgcctaacatttgtaagtactatgttttttggtgattcttgttatccattcattgtttttccagccattcataattagtaaccttcttatcttttagttaaccctatggaatgctagccttatagagtaaatctttcaatttttttttggaaagtcatttaattaagcaaatccactatacctttggtgaagtttgtgacctgatttgccatctattaagtttgcttcactccatgccatttggattttatttttttccactccatgccattgacagattgcatggattcacaacgtttgaaattaggatttgaagtttcttttcactccattagtgaagaaatccggttaggattgtggccgaaggagctgtctggtgctctggtattggtatgcccctaatgccggggatctcttggggctagtccaagtctctccctggttatagttgccaatatactgtactgtcaatagtgttaaggcccattaggcctaggtctactgcctacatcaacatcaacataaccttttagtcccaagcaagttggggtaggctagagttaaaactcaacaagatgtcaccaaaaggggaaagagagagaaaggggggaagcttttgagagcactaaaaggaaaaagtcctaatcacgggcctaatcacggttcgggcacgtggatagcttctttccaagtacttttttttctcgaacgcgcaagagacatgcacatcttttcattaagaaggaagagaaaaggatccaaaatggatcagtacaagaagacccccattacggtggtcgaaaacaaagaaacaaaaatacatccataaataaaaggaaccagaaactactttgatctaaagacctgggattggggatgttaggagatctaagcttgtagcccctcctaacacccacagatccctctcctcctcggtcctcttgatggcttcattaaggcagagagaaagaccgtcaaaaacacaggcgtttcgatggttccacaatatccagaggccgagactgataactgataagcgagtttagtccttttctggcaattccatgcaactggtcactatatcttttccaccaaagcatggtactctcttcatagacataggagtgaaattctggaggttaacctttgtcagcagcttgaaccagtaatttcttgcaaacacagctcacgaggagatggtcaatggtttccatttcctggtcacaaagagggcactgatcagggtgatcaagccccctcctctgaagtctgtcagctgtccaacacctttgcagcgccacaagccataggaaaaatttgcatttggggggggggacatgagtgccaaaccctgtcacaatgctcaaaatatgttgacccaataaataaactctcgtaggctactttggcagagtatttgccgttatgagcaagcctaaaaatgtgtttgtcctctctatgcggatttatgtttactgtgagaatagcatcccaaagatcaagataatcagcaaggacctccacattgagagctccttggatgtcatttagccaacttctatttgctagagctgtatgaacagttctactattttgaattcgccttggcacaactagtagtaatctgggagcaatatccatcacatttcgtccatgaatccatctatcttcccaaaaaagtgtcgagtatccattgccaatttccgtgtgagtggcagcatgaaagaaggatttcacctttgaaggaaaatgcatagggagtcctgcccaaggtttatcaggttccactttagccagccacaaccatctcattctcaaagcccaaccaagttctttaaggctgaaatgcccaatcctcccaactcaactggcctgcacactctaccccaagccaccaggcagtgtccccctctgacttctttttttccacggcacaggaatcctttcctaattttatcaatatccttgaaaactcttggaggtaagtccaccgccattgcaaggtaaatgatcattactgtcataacatattgaacttgcacttttcttccagctctggtcatcaagtcagctttccacccagggagctggtcagcgatcttgtcgattatgtattgagtttgatttctggaaagcttgctcaaagacagaggcaggccaaggtatttacaggggaaagaagagatctcacaagggagacactcctatctaaacacaactctattgggatattccattccttcaagtcccttttgattgcctcctcccatgtcaagttttgtcgacctctacctctcttcacattattgtcccatcttatgatgcctctatgcaccggtgactctgggggtctccggtggacatgcccaaaccatctcaaccggtgttgaataagcttttcttcaattggcgctacttctagccgatcgcgtatgtcatcgtttctcactcggtccaatcttatgcgcccacatatccaacgcaacatacgcatctctgcgacacttagttgttggatatgtcgtctcttagtaggccaacactcagccccatataacatagcaggcctaatcgctgtcttgtagaacttgcctttcaacttctgtggcactctcttgtcgcataggactcccgatgcttgacgccatttcatccaccccgctttgattccatggctaacatcttcaatatcaccatctctctgtagcatcgatcccaaataacagaagatttctttctttggtactacatggcctcccaaacttacatctccatcctcactaattgtagtaccaaagtcacatctcatatactcggttttggtcctgctaattctaaatccttttgactctagggtctgacgccataactctagctttctatttactccttcccggctttcatctactagaactacatcgtcagcgaaaagaatacaccaagggatatctccttgtatatccctcgtgacctcatctatcactaaggcaaatagataagggctcaaagctgaaccttgatgtagtcctatgttaatcggaaaaacatctgtatcaccatcagttgttcggacactagtcacaaccttgtcatacatgtccttgatgagcgtaatatactttgttgttactttatgcttatccaatgcttaccacatgagattcctaggtattttatcataggccttttccaagtcgataaaaaccatttgcaagtccttctgttccttatatcgctctatgacccgccttattaagaaaattgcttccatggttgaccttctaggcatgaatccaaattggttaatggtgatatgcgtcatccctctcaggcgatgctcaataactctctcccatagcttcatagtgtggctcatgagcttaatccctcgatagttggtacaactttgaatatctcccttgttcttgaagaccggtactaatgtactcctccactcctcgggcatcctgtttgatcgaaaaaaatggttgaacaacttggttagccaaacgatagcaatatcccaaggcatttccacacctctattgggataccattcgggcccatcgccttgccccctttcatcctctttaaagcttctttcacatctgattcttgaatcctgtgtacaaagcatctatttagatcatcaaaggagtcatccaattggatgtccatggtctcattctcaccattgaaaagattgtcaaaatacctctgccacctctgtttgatgtcttgtcctttcaccaagagttgatccatctcatccttaatgcatttaacttggttgaggtccctcgttttcctttctcgaatcctagatatcttataaacatctttctcctcttcctttgtacttagtcttcggtaaagatcatcataggctcggccctttgcctcactcatagctcgctttgcagtcttctttgccaccttatacctctctataggtctactgcctatatatatatatatatatatatatatatatatatatatatatatatatatatatatatatatatatatatatatgttctatagtccatagggactggtcatctctggttaatcccaaggttagtaacatgaagttatttttggtacacctccgcgatatgattatcttcgagtgtttggatgtacgtgttatgtcttgttaccaccacgtgagaggactaaattgaatgctcaatctgttgagtgtgcttttcttagatacagtcctgaacacaagggctatcgttgttatgatccatctactcgcatagttgttaaagcggtaaggcgacaggccccccctttaaacttttaagcagtaaagcgtaaggcgaggtgacaccttaattgtttagataaatataaaaaattagaccaaatattatatatgtatcactaattcatacttaataacccatttcagtcttgtagaatagaaaaacagagtaaaagaaaaagaaaaagcccacaaattgagaactagagaaaaagaaaaagaaaaaggcccacaaacaacccaacaacacctaggttaaaccaactcctcctctctcttaggctctcagccgccgctgccctcctctcttcctctctggacgccttcctctttccctctccctagcgccgcgcgctgcgcctctcctaggctctcagtcaccgccgccctcctctcttcctcccccgttgctctcctatctccctcaccccgcacgccgcgtctctttcggcgacgcgaaggcgccaccgcgtgcgtcctgcgtgccgccgttgtgcctctcccgaccccctgcatgccgttgccgtgcctcgcattgcccgagagtaaggcgacaagacaccttatgggtcccaacccgccttagcgtttaagcaagcgatgctttagtgacgccttaataactgtgtctactcgtcgtattcgtatttctagagatgtgagttttaatgaaaattgccccttctttcacaaccagcccactcactcatattatcccacagagtccacctctttcatgtgacttccttccattcccgatttttcatctgaaccatcttctatatccacacctgatgtcctcattcccataacaccaccttctccttcattttactcttccaaacctcctgtcatccaaacctacatttgtcgttcacgctctattcccactgctagtcctgatactgatcctgttccagattcttgtactaataatactgagtctcaagatgtttttaattagggatatcaacttcatgatcgtggcaccgttgaacctctagatcgtatggttttccgcgagctggtgtggcaattgttgaaccatccacttatcaggaggcttttgggattcctgagtggcaacttgctatgatcgatgaattgtctgctcttgaacgcacttgtacttgggatatagttcctttaccttcgcatgttgttcccatcacatgtaaatgagtgttcaaagttaagacaaaatctgatggtttcgttgagagatataaagctcgtcttgtggctcgtggttttcaacagactcaaggacttgattatgatgagacctttgcacctgttgcacatatgactactattcgtaccttgattgcagttgtcgcctcgtattcttggactatctctcaaatggatgtcaaaattgcttttcttaattgtgatctgcatgaaaaagtctatatgcatcctcctcctggggctgatgctcccccaggacatgtttgtcgtcttcgtcgcgccttatatggtctgaaataagctcctcgtgcttggtttgagagatttatttctatcatcatggctgctagtttttcttctaatgatcatgattctgcattatttgtccatatctctccaaaaggtcgcactttacttctattatgtggatgatatgataatcacaggtgacgattcagagcatatttctcgcgttcatattctgagccaatttgtatccacacctaactcagttcattatggtcatttgcttcgtgtgctgagatatttacgtgggactgtgtgtgtagcggtggaagtggtgtggataattatccgatccgattcgaatcctaattatacgtatatggtggagttattatggataatcataatccgatctacgtgtggatgcggagtaggatatggtatcaccaagatccgacggatatggagtattcgatatttgaacatgaattatctgatgcttaaaattgaataatatccgattagcttgtcaagtacaagatagggagtcagtcaacaatgattgtttactgtccaaataaaactgaaatttctatacggtagaacatgaaatgaaacactatccacgacagaaatcaatcgccacccgcaacccaacaggcaacaagccaacaagaatcaatcactgatctgccgatcacaccgtatagtgtgtgacgtaatgatatttattatttacctacttagtcatttattatagctatattcaagttatgttttcaattattaaactttaatttatgaattattgatcgctataaaaaatagatgtatacatgtattatccgacctttgaaatccgcttctgccacgcttgcgatccgactctgcaccattttcgacatcctaatatatccatatcactatccgcaaccgcataatatccgctccgatctgaatccaacaataaaaataggattaggatatggaaaatgcgttatccgctccgatccgtttgcacccctatgtgtgtgtgtgtgggccggcacctttgttgggttgacgacccattagagttagggttctgagtctatatatgcaaccaccacctctatgcaatataatcaaagggtttcctacaagttatcaaattaggttttcacctctccctacccaacaaccgccggctctctcccaaaactagcagctgctgcttgctcctcctacctctagccgccagcaccctcctcgtgaggctcatccttctctcccgggggcggccaccatcccaaccgtcggtcacctcctccccggcgtgaccatccaccggggaccctgcggaggtggatctgcgcgcccctgccctcccccggctccggaggcacggccgcggtccccttccccggccacggtgcggtgccccctctccagctccttgtgtgagccccctggtgtcacgcgaccctccttgcgctccgtcgtggctctcttcacctctggcggcgcgcgtgcggccaacccctcttctcctttcctgagtgctgtcgtctccttcccatggccactgcagcttcctccctcttcccgtgtctactacagctgcccccgactcccttatcgctcacccctgtgccggtgtctccactcgtgcaaccccccgtcatcgcgccggctacttcctccctgcccgcgctgatgccatgcaacgctgtaacaccccgtcgactcttggaccggcggtacttactcctggtggctctaggaccatagactatccccacaaaccaacacgagtcttttgtgcgcactttgtcctcactcgtgcgcacctggggaaacttcctggttggtcacccatcgcaagatttctgtaggccaagcacgcttaacctggaggttcttttgaggtaggcttctgaaaaagaagatgcaccttgtggtatgaatactctattaattctattaagcgttgggctaggatatcaccatccacgagggctaggatatcacaattcacccccttagaagaccgacgtcctcgtcggtcaaccccaagccaggaacctcctctcttggccacatatgtctgccaagtgtcgtcatatgccatgccatgttgccactccgacccacatgcgccatgcgccatatgtccgaacccctagcctagacacactcgtgaaaccacgagggttggctctgataccatttgtaacaccccgtccacagccggaccaatggtacttactcctgtcagccctctaggaccatatgtcgtcctcacaggccaacacgagtcttttgtgctcactttgccctcactgatgcacacccgagaggacttcccggtcggtcacccaccccaagattgctctgggccaagcacgcttaaaccagaggttcttttgaggtaggcttatgaaaagaagatgcaacttgttggtatgaatactctattaattctattaaaccttgggctaggatatcaccatccactagggctaggatatcacaggcgccaacctttaggcctctccctcaagcttctcctgtcgttggcgtcaaactccttcctgccaggcccggtgcaggcccttgcttggctggacacgccccgtcacactcccccttcatcattgcctccgtcggatctatcgctgatgggccttctcggccggatccatgttgctgcgaccttcccggcttgatccgctgcccctttgtccggatcgtcgtcttcatggctggatccgtcgctgccgtggccttcccggctggatctgctgatactcctattctgccgcaggcgtgaccaccatgactggcgggtatcctcgacgtccagacgatcgaagaagcaagaaggtcggcctgctggtgcccttttgttgtgttgtcctgctgaccgttgaccctcgtcccgaagaacaggctactgttgcgtctcccgaccacgaccacctcgacttcggctaccttgacatccaagggctatcgtcttcttggagtccacaccggtctctactcgaaccacaacattcgcaccctcacgacgctgcgactgcggggggataccaacccgtcgcctcctaccttcggcttctactccagtctcatcgtgtgtggggcccccgttgcgactgcgttgggatgttagactgtgtgtgtatgtgtgtgtgacgacaccactattgggctgccggcccattagggttagcgttctgagtctatatatatataaccaccacctctatgcaatataatcaaatggtttcctacagggacaagatccagatgtttactctatgcttctgatagcccacttcagtttcatcctttgatgcaacttgggcaagtgacccgattgaacgttgctctattacaggttatcgattctccttgcatcctcccctattgccagtaaatccaagaagcaagcaacaatatcttgctctagtaccgaggcagaacttcgagctctttctactactgctgctgaaattatttggttgcgatggcttttggctgattttggtgtcacctctgttatgtgataacatgggtgctacacatatttcacatgatctagtgaagcatgaacttactaaacacattggtgttgatgcatcgttcacctggtctcattgtcatcagaagattattgatcttcaatatgtgcccttagaatctcaattcgcggatttattcacgaaagcacaaaccagcgcacaacatcaatttcacttgatcaaacttaatgcttaagatcctccacttccaccttgagttttggggggggggtgtgtgttaaggcccaggtctattgcctatatatatatattatgtagtccatagggactggtcatctctggttaatcccaaggttagtaacaaatagtaccactgttctaattttttagcatgtgtgggtgcatgatgtttgtgcattgtgtttggatgtttatctttgttacagagagaggtagacaagtgatggagcaatatagggagcgaaaggacctaaacatgaatttcatagacctggagaaatcttatgacaaaacactaaggtgtagtgctagttgatgaaagccgagctagagtaaattggaaattggagctgtggcgggaggccctagagtccaaaggtatgtgactttggcactactacatatgaggaaacatatgaggaaggagatgttagtttggaaattcaagtagtggccaagaaggataccttcagtatttaggaattaggatcaatactacatagggatggggatattgatgaagatgtgagccatatgatcaaagttgggtggatgaagttgtgtcaagcatccgacgttctgtgacaaatagagtatcatagaagctaaaaggcaagtttcataggatggcgattagacctgctatgttgtatgctgcagaatgttggcccacaaaatgacatatttagcaaacaggtgtcgaggaaatgcctatgttatgttggatttgcggccatacaagaagggatcatgtacataatgatgataatgatgatatacgtgataggctagaggtagcaccagttaaagaaaagcttgtctaacactgattgagatggttgtcaaatggacatttctgcccagctgtgaattcaataccttggctgtcattctgctgaatctcccaccagcattcttaagcccctcaggcatccgaagacaaggttcagctaggcgctaggcggaatctaggcggtgacccattgcctagcgcctagtcgggagtactcggtcttaggcgcttctaggcgcttttctaggcgttttggcaatatagccataaattatatatatatattatgtatataactatatatacgttaatacgtatataactactatatatgactatatgagtcacagtaagtataaaaagaaggccagtagacatatctgattcctagcttagcttactcttgcatgttcctagctcctgcaaggctgcaacacattttgacagctagtagttagtaaattagtcaatagacagctagctgttcataaaaaaaatagaaaacactaaattgtgacttatctggatgatttcagcagcctcccattcatgagcagttgagcacactgcacaccatatcagcagctggtaattacaacacaagtggataggacagtaatacaagtgcagaacacaatttataaataaaggacagcacaagcacatagttcttagttcaggtctcacacaaaagaagacacacagacacaaagtgacacaactgcagttcataagaccagggcatcacaaaaggcttcactactagatggagatggtccagatcatatttcatcttcactgtagcacaaatcttcatcttcatactcttcttcttcagactcaaactcttctccttcatagagctctctcactcttgcacttctacgaggctcaagctgttcttctgctcccactgcctctccaataacagaccaaggtatccctgtaccttccatctcatcttcctcctcatctctaaagacaacttgtgcacaatcatctccaccctcttggagaaaaccttgagcttcagttgtatcactagacaagagaacatcagtgattttctttgacttaatcttttctctgttattcatcagcctgttattgaactgaatatagaccaacttgttgaggcgggttgtagtcagcctatttctcttcttagtgtgtatctataaattagaaacaaaagcattttcagttctgaaatttaatcatagtactgctgaaatgattaatagataggtactaaccccttcaaacccactccaatttctttcacaaccagaagagcttgatgtcaaagataatatccttgtagccatcttctgtaaagctggtgtttcagttccatataaccgccaccatgatgctgaaataaattagaaacacctctattagtttaaaaaacagcaaacaaccatggtagaaaacagcaaacgaccatataataagtagttaagtacctctacctggattgtaatcatagttttgaaaagttcttgcaagcttcttgctaaatggtccttctctattctgaaattttttcaattcaaagttggcagcctgttcttgttggtcctcatcatgataataaaattgctcgacacaagatatgaaggcttcattcattttgggctcatcaaatattgatgggttagcatagctatagtgtggattcagcaaaaaagctgtcaaatgcaatggagaatcaagtcttccattcatcttcttctcaattacagccataacatctttgaatcgagactcaacattgccaaaggcctctttgatctctctttttgcctttagtagctctccataaaggaaacccatggatggcttcacatccccatcaaccaaacggaggactttgaccaatggctcaaaaacagccaacattagcttcacatccttccaaaaggctggactcaatatagtagctgtggcctcttttcctttctttgatttcacatcctttaatgagtcccacctgctatgaactaccatcttccttaactggtccttcttctcttgcatactgttcaaagtgagaaagtatgaagcaaacctagtcactcctggcctcactagctctttcccctctgtgaagtatctcaagcactccaatgttcttgtgtggccatacacaaatatggtaaatgactttgcttggtcaatcactttcctgaaccgaggcaatttgccaattccttggagcatcaagttgattgtgtgagctgcacaagaggtccaaaatatttgtggtctcttctcaagcaatagcttctttgctcccatgttgttagaggcattgtcagtgactacttgcaccacattttcttcaccaatgtcttcaattgctttgtccactaattcaaaaatgacttcgcttgtgtgtgacacatctgacatctcttttgagctgatgaaggaggttccatcagcacaattagtgcatatattcattatgcttctcctcttcctatctgaccaagcatcggtcataatagagcaaccatttttcatcttctcggcttcacgttcctgcagcaaacacttggttctttcatattcttcttccagcaaactacctcgaaaagcatcttgagttggaggtgtaagtcctggtccaaattgtccaattgcttcacacatttgcttgaactcatcattgtcacatgcattgaaaggtattcctgccaatgattaaaaaatgaagtctaattttaaaatgtgttcagttcatgaattttaaaatgtgaaaacagcatcgtatactagcaatttaccatgattataggcccatcttgcaataaacttgtgcacctcatgctctctttctttccatagttccttgttcagctgctgttgtttgaatgaatcagccttggtaggatcaatagcacgtgtccatttgtcaattggccctaatttgtgaggctgtgagcttccaacacaagtgacttcttctgactcctctccaaccctagatacattcacttcctctctaagttctagctcacgaacagtcttctcctccctcttcctttttgcagcctctattgctttcttgcacttctctttagcctctagagcctgcggtgttgcagacgtgcatttcttcacgttctttccaacatgggcaagatgctccttcaacctataaatccctcccctcatctccttgtcacagaacttacacttcaccttgtctttgttgttagcatcaacaagaacaccatattcccatccaacatcatctgaatttctttttaggagattcgctctagctgcttcagtttcagaaggtgcagctgcagtttctgatgacatccttaaaccttaatccttttatttctttcacttgtacactgcacaggggaggaaaacagtttcagcaggggaggaaagcaggggaggaaagcaggaaagcaggggaggaaagcaggggagggggatgagcagggaggggagcagccgacggggaggagaactcaccggcgggggagcagggagcaggcgggggagcagggagccggcgggggagcagtttctgtcaccgtctgggagggagacggctacacagcgggcgctaaaagcctaaaactaccgcgcgctaaacctaccgcgcgcgcgcgctaaaactaccgcgcgatgcgcgcgctaaaaataccgcccgccaacgcgcccgccaacgcgctaaaaatactgcccgcgcgcccgccaacgcgcccgcctaggcgcctgcgcgccgcccactcgccgcctaggcgcggctgcgcgccgcctagtcgccgcgaccgcctagaagccgcacagggccctaggctacgcggcaggctgtcgactagcgcctaggcgcgcctaatcgccgcctaggcggcgcctagccgaacactgtccgaagatagcaattggttccactgggggttatgaaactagtcttcggctcatcttccttcatccagatctgatgataccctgaattgcaatcgagtagactcatgagctccgaagttgcagctgcatccactagtgagtcaattcttggtaatgggaactcatccttcggacttgccttgttgagatctgtgaaatcaatacacatcctccacttgtcgttggatttcttgaccatgactgtatttgccaaccgttccggatatgcaacttctcttatgactccagcactgagtaatcttttaacttcggctttttcaccttcggccttatcttcggacatcttccagagtttttgcttgcgtggcctaacacttgagtccacattcaaggcatgctctattatacttctatccactccacatagatcatttgctgaccaagcaaagatatctttgctgtgaaataggaaccttcgaagattggactcttgctcttaagtttgctgtttgccgaagaatacctttgctctgcgacatcatcacagagaagtattggttttggctgatccgccgaagatgccttttctttcactggcttttcagaatctcggatttgcctttcggcttcatcgatgttgtaaacaattttcggctctggcagggtcccttctgcccttcttgctgtttcttggctaccatacactgatattaccccttgattgctgggtatcttcatgcagatgtaagctgaatgtaaaactgcttcgaagacattgagagttccccttccgatgacaatgttatatgggaattccatatcaacgacatcaaacattgtatcttctgttcttgtgtggttgacatagccgaaggtgacatgcatgattagctttcccaaagccattacttgctgtcctgcgaagccacaaagaggaaaagctgagtcttggagttcatcttcgagctcctgcatttgtctgaaagccttgacaaatctgatatctgcaacactacctgtgtcaaccaaaatattgtgtactacaaaacctttgattacacaagagataaccttggcatctctgtgtgggtaatctttgagacgaagatcatcttgagaaaaagtaacagggatatgggaccatttacgatccttggacacctaaatgcaacgcccttttttgggcttctttcttctgctttttattactgggttcgaagctcgagcgcccagtaatggggagagtaagcttctccatggaagttgacgaagcttgatggcttgccatgctcttcgtcgtgatgaagattgtagtggtcgtgagatctccggaggtgggtgccaatgttggtcacttgttttcaattgctgtatggaatcgaaaacaagacaacacaatgataaaaaagtagaaacctttgtccttatctatagtcaccagtgaggaagattgaagttgacataggaagagatagtaaaaggagatttggaaggatagaatatacctaaagatttagccttgaataaaaatgcattgaaaccaactatctatccacgtgcctgaacttggacttgtggcttctgttgggtttcaattctagcctatcccaacttgcttggaactaaatgctttgctgttcttgtaatgaaataacatgtagctttcctgcatgttcaaaaaaaagaagaaatctgaaacctgaatggcttggataatggaaaatcattactagaagttctctgatgtcaaataattaattacctctttaattgatgggagaacttacatgatcatcttggattcttgagtgcttggactacctgaaagcataatgatccgtttatctttgagtgttttggaggtcgagacagtcttataggcattcttttttttgtagaagttgatctgtggaatgtgtgcttgagccaggggtttagcacaacatttgtcccaacctagcctgcagtatgatctatgtggcatggcatgtttgcttttctctctctcctcatctcttttgttgtttgttttcaaggaggatgatccacccttctaacttagggtgtactcatgcgacatggtgtgaaacgatttcttcattgcactgccagatgcacaatcgtttttgcactcatcaaaactaaacgttgtggtggtctaatccactcatgtgcatgctacagtacatatttgaaccatgttggcatctcaattgtaaacacaatttttgttctttgcatatttgaagtaggatgacagaacaaaggcttacaagaggatggttgatgtcagtaggagaattgatgactaccgccagcatccacatttcagtgttcttgcaagttcacttgtctcaagccgggtttcagaatgcctaaagtcatccaaggttagaattatcttctttctattttgaagtatgcatacatcacgataaatgccatcctgatatgctgggtctgtgttcttagttaaaatcaagtgtttgaatgcaaacggtccaacctaaagtttttattttgtccatacccaattatatcactctaacctagaagttgttgatgaaccattatgtttatttaacacttctaattggttggttgggttatcactcatcaggctaaactatggtgctcttatttgagaatatctggtttattgtgttctacacactgtcacactcataagacctattcagctaagcctttccttggaacttaacctgaccgcagaagggaatgacagccttcttgaaaatgatcaaatgcatggttcggaactgttaccatgaagtcatgaaaactttcgatacttgttcatgagtaatgagttttcgaggagtatttgtcaaatattgaaagaatatctgcatctgatattctgatacatgagcgttcataagttttcactcaaatccatttcagttgcactggagtaacttaaaccttcaatttgctgaagttcttaattatcttcatagctttagctagctcctttcgtttcacagaacttattaagttattattttagcctgggcacaagaatgaggtagacaaaatgactatcctaccttggttaatcccaaccatgcatttgtgatgtcaaaagcacacactaactctcccatactagttaatgaaggaattgagggatatgattggaaaaggtaggtcaagttacctcaacattgtagaacaagtattctgactgtaatagaagagggcaagagggtaaaacaatgagcattgttaaatggatggagtaattatcttaggaagttactttggaataacggaaaaaggaaaaaaaactttgttaagcgctagtaacaataagttaattctgatattacaactgtggtgctagtaattgtttaacattattcattgacatctgtatctctttcagttgtactctaaaaaggcagatggagagacatccacagatacatatggaatgaaatggctaaaggatgttgttctcagcaaaagatcagataatgtttttaggagtattatggttggagacccaaaaattaagttatgggaaattggcattcctgaagatttatcctcaagcctggttgtttctgagcacgtcagttcttataattttcaaagtacaaatctgaagtgcaacctgcaccttctagccaagcaagaactatttattcggcgaaatggaaagctaatgtttcttcggaaggcagaccagctagaaataggtgacattgcctatagaccattgcaggatggtgatattattctcatcaacaggcctccttcagttcatcaacattcattgattgcattatctgcaaaaattctaccaattcactctgtcgtatcaatcaatccactatgctgtacaccttttgcaggagattttgatggtgattgtttgcatggatatatcccacaatctatacgctcaagggttgaacttgaagagctggtaagcttacacaaccagctgttgaatatgcaagacggtcgaaatttggtgtcactaacacatgactctctagctgctgcacatttgttaacaagtacagatgtttttctgaagaaatctgaattacagcagcttcaaatgctatgcctttcagtatcaacaccagcacccgcagttattaaatctatgaattttcaaggttctctgtggactggtaaacaacttttcagcatgcttcttccttcaggcatgaatttcagttgcgatacggagttacatatcatggacagtgaggtgcttacctgctcactgggttcttcttggctacaaaataacacatctggtcttttctctgtcatgttcaaacagtatggttgcaaggcacttgacttcctttcttcagcacaagaagtactatgtgagttcttaaccatgaggggtttaagtgtctctctttcagatctctacatgttctcagaccattactcaaggagaaaactagctgagggagttaagttggcactgtatgaagctgaagaagcttttcgagtcaagaaaatattgttagatccaattaacataccagttctgaagtgtcacgatgaaactgaagatgtaacttacagacaatctgattgtatccagagcaatccatcagttatcagatcttcaatcatggcatttaaagacgtcttccgtgatctcttaaaaatggtgcaacaacatgttagtaatgataactcaatgatggtgatgataaatgcaggaagcaagggtagcatgttgaaatatgctcaacaaactgcatgtattggtcttcaacttccagctagcaaatttcccttcagaattccttcccaactctcatgtattagctggaatggacagaaatcgttgaactatgaagctgagagtactagtgaacgtgtgggaggtcaaaacctttatgctgtgataaagaattccttcattgagggtttgaatccattggaatgtcttctgcacgctatatctggcagggcaaacttctttagtgaaaatgctgatgtaccagggacattgacaagaaaattaatgtatcacttgagagatatacatgttgcctatgatggaactgttagaagttcttatgggcagcaaatagtgcaattctcttatgatagtgttgatgacctagtagataaactcggcgccccggttggatgtcgggctgcttgttccatttcagaagctgcatatggagctttggaacacccggtcaatggtttagaggactcccctctcatgaatctacaagtaatattctatttctgttcctgttaatgcctatactctatactttattattatgtgtacacggcctctattttcccaatgtcatgatatgtgtgaattttctgtgcaggaagtatttaagtgtcacaaggctacaaattcaggggatcatattggtttgcttttcctgtcaaggcatttgaagaagtacagatacggtctggaatatgcatccctagaagttaaaaaccatcttgagcgagtgaacttctctgatttggttgaaaccatcatgattatgttagttcacttaaatactgtgttcctgtcatttgatcttttaattatgttattcatgtaaatattgttttcctgtcatctggtcttttgatactgtgcttttgtttaatcaatgtttcattttgtattagatacgatggacatgacaaaataagaaacgaaggaatgtggaccacccattttcatataaacaaggtcttattttttcacaatgattttcttttatttgcttttcaaatcggtgatgtaattatctgttttattatgtatatatttgcaggcaatgatgaagaaaaaaagattaggattgagatttgttgtagatgaacttgcaaaagagtatgacaccaccagagatcagctaaacaacgcaatcccatcaattcgtatctcaaggaggtaagcaccaaacctatttgtgtttcaatgagtgtctatatctatttattggcttcatcttttttctcgaacgcgcaggatatttgcctgtcatttcattaagaagaaataaagttacaagcaaaggaggggaaaccccctcccttaccaaacagattacagaatcaccagttcaccactaacttctaacaatacccatgaccagggatcgacacataattaaccaatgaaatgtgaccttaaggactcaactaagagttcccgcagggcctggccaccaaccatacaccagagggaacactcactagctacatttaggagcatatcagggatgctgcatattagagtgttttccttgttgggcttaggccctgtatacaacctattaggggtgctcctatatgtatccacttgtgctggttgatggactgttttgtttttctcctccaacatggcgtcaacaaccttctaaccttagccgtcggcccaccgcccgccatggatggtcgcctccccctggcttggccttccccctccctggcactgccttccactctttcctcttctcggacctccacctcctggccggccatcgcagggccatgggcgcctgcctcggatcccgttccactatcgttggcctggttggctctatcgaggctccgcccgtcgttagtgcttctccagccgctcccgccaagtcttgcgacgccagcctgtacgttgccctggccctgtcctcgtcggcctgcttgctcctagcgtcgttcctcccatgtcatgcgcgggccgtgactgttgctttcccttcttctggtgtcgtggctacgggcccgtatgccttggtgtcacacccggttttggaaggcaaaacgaatgcgaaccatgtacgtgtcaagatcagaattcacgtacacaacgattacataaatgacttatcatagcacaatgcttcgaataataataaagagtaagtaataatattacagacatgagtcataaacataatatatatcaaagtgcacataatagaaacatagccaacgtaaataaacccaccatagtcagctgactaggggaggtcgctagcctaatcctcgaactcgttgaagtcatgaaactcatggagatccgccttaacgccttcttcttctttacctgagcatatgctgtaccaaaggcaacctggtgtttgtgaaagcaagggtgagtacgcatcaacgtactcatcaaatgtcccgtttggctgaggtggactagctttatttggagttaggttcaaagagggttgcttttactttgtcaagttttattcattaatataaggcaagctttatcatcaatcccaagttgttatcccaaagagtacctcctcataggggaaataccaaaatccatagttagaaacatcattgatagaaccatcatcatcatctgtaaccaaatccataaatggaaccatagtatctcgaaccatctgtatctctaatcaaagaggatcccaatgccgctcttaaccgtgagcacgactgatatattagtttcattcctctacagaggtcgcacactttacccatgagacgtgattctctttttgcccgaggagcgctactcccactgatcacttcctaggtggtctggcagggtatcactacatagcttttacaaagattcccctggtgtatagccacccgttaggttgcgcctatcgtacagacatagtacacctccctaagggggtgactaacaaaacaaatcgaatgaacctcggcaccccacccttagcagagcaaacactatgccctagcccccattgacgccacaacaacgaagcaaactacacccccagattgcaccaattaatcagctaagggcgtcccataccacccacatggttgcactgttttcctgggtggtctctcaacgaacaggtccttacggagaggtactcgggtaatagcccgagcccccttttgcgccacaagttcatcatcacatccagaataaaatcatcgtatcataaatgtatctcattatgttcattgattaaagtagagcgctagcataaatgtatctccgtggccgcccttacgggggcgatgagcttcgtcagcgttggaagccggacgaggagccgtagggaccgcgggaggagggcgggcaggggccctggtcgacggaggacaaggggcctgcccccaggagggtgcctgaccgttgggaggagcgctgtaaagggccggagcgggttcctcggtcaccatggtgagctcctcgaggagaagctcgttccgcatgacatggaaggtgggaaagggtacgatcctcttgatgagagccttcaggtggccgtagcgggggctgaggctacacagaaggttcaacaccaaggtacggtcgcggagggagtccgccatgcccttcatctggtggtagtactccctcacgaagagatccacctaagagaactggtggaactaggcgtcgaggtggagggcccgagcatcccggttcctgaggaactattcctcgaggcgagccacgcctgtcggcccatgtccgcatagtcgcggatgatgtcctgtagcttgacagtgatggtgccgtggagccacgagagcaccacactgttcattagggaccaggatggagacgaaagacgacgaggtcgtggaggacgtggtcgacaagagcataccaccaaagcgtgaggaggacctgcccccgccaacgagggtagtgggaggacgccgggtccaacacggtggacacgagggaccggatgttgggcagcccagcgttctgagcgttgagagcggcgatgtggtcatcgtcgagtccagagagcctcatgagtgaccggaggagctgcctgggcggccgaggggtggtcgaggatgagacgttgcgcggtggccatctgcacggttagggcggcgcccatgacacgctcttgctcgagggcaagggacgcgtcgcgctcgcgcgcctgcgaggcagccacgacatcctggatcgtagcgatggcatcgaccaacgcggagtcggtggcagaagccgtcggcgcaggagtagcgagggtgaaacccgacgggggtcgacggggctgttgcgcgggtgagaggtcgtcggggagaggtgcgagatcgttgatgtaggggaccctgtccacgacgaggttgctgctgtgggtagaggggaagaggccatggccggcggagagaccctcggcggcgagctgctaggtggccgcggccagggctgcggtgtcggcggcggacgctgcgcccagacctgcggtgtttgtggtggtcgccgttggggatgtgccagtggggaagtcgaccatggcggaggcggggttgggggcgccacggacaatagcgggcggcgactgggggtgccgctggaggaggaagaccggctgcgggcggtgggggcagagcggcagccgggagcaccgcagcaggaggaggaacgggtcggtggcggcagcgcgccggcggctggggagccgacggcgggagggagaggatccgacgactgggggccgcggctaggagggaggtgaaaaaaatgaacctagctctttaccatgtggaaaaccctaaccctgacttagggatgggtgttgtattaatagacttgagttaactgctcctggcccattacacaggggtgagagtaattacatggggagaaccctaaacgggattctaacaacggcgatccacttgattgaggctctgggcatttcaaatgagaattgataacagattcatcttggcaagcttcttcgagcgatctaatttgcttcatctttaacattgtctgttgcttttcactacatgttgatacacatttaactaatttcacatccactttcctttttggaggaaacaggaggtgcttgcccctactggaaatatattaaacaagtacaaaaacaatctgtcccaaaaagagaaaaaagggagaaaaaaccctgaaattcaaaagaagctgtttagctagacactgatgctaggaaagtaacttctgagcactatgcagaagcattgtgaattcatgttcaaattcagttttacaagctcgtgcacagggacttgcttgaacatccagtcatttctcacaatccagatgcttcatgctaggatgatacttatttccatagagtgtgggactgcaaggccatctttgaaagccagaagaataaggtgtggattgtctagttggggaactttcaagttgcaagttgagtcattctagcagtcagtggcaaaaggacagtgcaagaaaaaaatgttccgctgttttgtgttctgtccagtacacaatgagcaattatgttttttttatcgaacacgcaggagaactgcgcatcattatattgaaagagagaaaggtccgaaatggaccaaagtacaatgccataacaggcaaatataaaaagaaaaaacagtgcagcctcatgcactaggaaaagccctagccctagcaaatgcacctagaagcccaagactctcgagctgcttcgcaccagccatacaccagcactccacctcatccaagaaaagcctctgaatggtgctcaatgaaggattgacaccatcaaataccgccttattgcgatgcagccataaacaccaggcccccaggataatgagactatgaaaagcctctgaatgagcaattatgtgggtctagccattttgtatgggcatatatgttatgtgtgatggaaaatgtttggcatttgctgtttgcatactgtgcattacaaaatgattatatttaaacaacattatttataatattaaattattagcttatttcttcattgtacatggctcagaagattgaaaaaaatcggttggtgtagccgtgtaggttcagtttcctgtataagataatcagatctcacattttacattttagacaatactgaactaagaattcaatatggttctcgttaaatataaaaactttagttctttttgagaatttgttctggaaaatgtcttgtattaaaatagttaaacttacagaattattgcagcaaaaactagttacatgcttaaattttgatttggcagtagatgtgaaatgaggccacacgccacatctctgctcattataaacttataatcatacagtcattgctatttgcattccacttctttctttgcatctcctacactatcttttcacatgtaaaacttctactgtgcagaaaatgtttagtaggtgacgagggtgttaaaagttcatcatgctgtatcgctgtcgtagcacatgctgaacgcaactccatctctcagttggacactatcaagacaagggtgattccaagcatactggatacactgctgaaaggttgttacgttttgatacatttacaaaatatatcccatatatttactgtgactttcctgtagaagtaagaaatcatggtctgagctatataggattcctttctaaactgcagtgcggaggggcaaaatctttccaggtgtagcttgtatggctgtttcttctgaaattttgtgaaaccatagctcacttcatttggctttttattattctagcatcacatgattttgtagcaaaaaagtttgaaccacttcatcctaaaaagaatgtcatcctaggtttggctgaagtcaaacttgaacgttcgactaggtttataaaaaagtattattaacatctgtaattccatctgtaacccagttcttctttagacctttcttttcttcttaaatatatttaaggcgcagttcccctgcgcttccgagaaagaaaaaactccaaataggttgatatgaaagtatattccattattcatctaatgacactatttacgtatcataaatattagtgtatacatcgactcctcgaaaagcgagaataacattctttttgggacgaagggagtgattctaaatagacattaactataaaatttagttgtcacagaatataaaaagggcagcccggtacatgtgctccagcttgcggggtcctgggaaaggtcggacctatttgggtctatagcacgcagccttttcctgcatttgcaagaggctgtttccacaactcgaacctagaggtcacaaggcagcagctttacccggcaccaaggttccccttcagctgtcacacaatatatctatgttttttccttgaaacacagaagagctgtgtgtcattgcactgattccagatctgttgatgtatagagatcttaggaatgtatcaagtgcaaaccagctgttcgccactacaatgctaagtcactagattcgggaatgaaagtaacttagggtgtgattggttggctacattagactgtatccaggcttgcacagtgagaccaatgcttcattagctagtgtgtcagatttttccgtattagataatacatgtttatataagccggtggacaacaacaacaacaaagtcttttagtcccaagcaagttagtataggtttttttctctcgaaagcgtaggagaactgcgcatcaatatattaagaagaaaataaaggtaccgatggacccaaagcctccacaaccaaactcatcgaggccaatatcactgatacaaataaaggtccatagagctaaaaattaacgcgacatgaacgcacacgctgcctaaggccaaagcgcacgaaggcctgaggctccagctaggcaccataattgagcctcaactgtgaatctgtgatatccgataggagcaagatgagatggcccccgctctgccctctcccgctctgccctaaaccctaaaccctctccccttcaacccacccctttcccttccgacgcccacccctctaacagcccctcgtcggtctccaccctagatccggtgaccaaccctctgtccttcaacctcccggcgcggtctcccaggtaggccgttcgaaatcctagaggtggagtcattccaactccgtctcctcgtccggcgggtctggttttgctccaggctcctataaagatgatgttctctccagttccaagcgtgataccggctccctctccacttccaaatggggtgcctgctcccctccaactgctctgactccactagctcatgtgtcgaaaaccagtgtgctctctaggtcgctgatacgacctgttcggcgacaaggacaggaagaggaaggctggcagttggttgagagcaggagaagacatcgttttgctgtgccacttcctcgtcgagggtcccaggtggatcttcgaggcaagtgctacaactgtctttctgccccccatcttgtcgtagcctttcgtagcccaacgcagtgtttccggtgcttcaagcctggccaccaggcgacatggtgcaccacccttcctgagtggaagtcagtgtgatagcggctgagtcatcaagggtcgtgccctccgttgtggcaacggttgtcggtgcagaggggacccgggcttcaggaggaaggtaccccatggctcagcacaaggaatcggtatgggtaagaatcactctgccattagaagctctgatgaaggattctaatgaggcattcgactctcagcgctacctccgcaacaagaggaaaaggagaagatcgaagaaaggaaaggaacgctctgtcgtcggcaccagtgcgagacatgagtctcccatcccacctgatgatgctgatgccaaccgctctccgaaggtgcaatgctggccgtgggacttccagccgttgccagatgcttcaattgatgcttcatgtgttatggttttttctgatgagatggttcgtgaggaagttcgcttcgccgggccttgtttgtcacaatcgctggaaccagacctgaggtgctaggtctggaaagtctagaagaagtggctcgtagtttcgacgtcgacattaattcaatgacaatccatcattccttacctgaggacttcctgttgttcctccctgactaagaaacgacaaccatagtgctcaacgttggcaaggtatttaggggtcctcgtttcagtttactgttcaaaagatggtcaagattttcacatgtttcctcttcaaccttgcctcacttggtggatgtggagatccgaggaataccacaacatgtttggtttcgttcaactgcggaaatcatcctaaagattcttgtttcattgaagaaatccatccggacaccttgatgaagagggattttccatcctttgtcgtgagagcacggtgtttcgatccagaaaagttgcagcgagagatggacctccatattgctgagctaggattgcaagtcaacgaaaaaagatgcttatcctataaaattagagtgagggttcttcagggagaccgacaaaccaggatcatggttcctccgcatcccatcggatgacgacaatccaccgggcggatcaaacggcaacgacgatcaagggcaccaggactctcagcctcggcattcgggcggctcacaggatcggcagcgagtagctcttcttcgcctgggaccgcagccgctggttggacgacagagtcatgaatgcacctggagaagctgatgtcaccacgcctgtagcctagcggggatgaggctgcacctttggtgcaagattttcggttactgtctctggatactactgagccagcaaccgaggagtcgctggagaattatctgggggcttcgcagtttcccaatgacgttgtcgtgccccccgtggagaaggtgaatagtccccgatacactgtttatgattgatgccggacaagccccggtgggccgcagacctcagccacgtcattttcgcctcaacccatggtggttgggtcgctggaaatgactgggccaagatcgctgcaccctgcggactgtccccctcctatgcctctactcatgctgcaagaaaatggaccacagtacaatgcccaaactaggcaaacaacacaagaaacaaaaaatagaccaaaacagcaaaaaatagaatagccctattctcaactcatgctgcaagaaaacgaccccagctgccacaacgtaagtacttgaattagccctgaccatattgaaggcagcaggaaaaccaaggctctcaagatgctttacaccagccctactccaacactccacttcgtccataaacaaacattgaattgtgctcaatgaaggtcttgttccatcaaaaacagccctgttgcgatggcgccataagtacctggcctccagaatgatgatgctgcctataaataccctttcttactcgtttgtgcatttttctatgcaccttgccccaccacacatcaaaggatatctcatctatatcaggagtgagatgagccattctttttttgaacaaacgcaggagagttgcacatcattatattaagaagaaaaacataggagagacaagacttgtcaacccctaaaataaaggcccataggccaagacccccttcactctaacacaacgtgccatgcacacagagcgacaccacaaccaaagcgacaaccaacaaccaaactgctagggtcccctagggagctggcgcaggaggaggtcttgcagagctgatgcgccagtcaagcactgccctcctcaatcacatcacacctaacttgctgggcgcaaggtacaacgccctcaaagacacaagcattacagtgcttccaaatctcccaaacaaccaaaatgatcagggagttaagaccttttcttagactcacttttgatactttggcgccaccagtttgaaaaccgtgtgcatccaggctgagggacaatggctaggaggcccaaattgtggaggattaacgtccatatttgccgagcaaacacgcatgagacaagaatatgttggatggactcctcggcctgagcacacaaagggcaagcaactggatggcgcgggcctctttttaccagtctatcagctgtccaaaccttgtttttgattgccaaccatacaaagaatttgcatcttaagagggcccaggtcttacagacacgtcgccaaggggcaaaaaagatagagccaataaaaatgcatcatatgccgatttgctacaataagtaccatgaccagagaggcgccaaatatgctggtctgcgatgtcaggttgaaaatctaccccatcagctaagttccagagctgcagatactccactaaaactggtacagacaagcctcccttatatctgacacccatttacgatctgtgagccccttcgctactattctccgctttaaagcccttttaaaatcatttggatcagggttggacagtgttcagccatagttttaccaagaagccaacgatcagtccaaaacttcacagattcaccactgcctaccacggagacaacaaccagatcaaagagtgcctttgcattacagtgcactcggacagggagtccagcccatggtcttgatgcatttgtcttctgtagccaaagccacctggcacgtaaggcccatcctagcatctccaggttgagaatacccagaccaccatactgtaaaggccgctggacagtttcccaagacacaaggcgggttacctccatttgcatcaccttgccccttccaaagaaagcctcttcttctcttatcgattgccttaaaaacccatttagggagttccagcgcaagcataagatagatcgggacagaagacaacactgccttaaccaggacaagacgaccagcctggctcagaagtttggctttccatcctgaaagtttatcaacaactttataaactagtggcaagagatcggagttagagagcttacggatcgacagaggaatccccaaataggtgcaaggaaaaaatttatatcacatggcaataaggcagaaatggtggctagctcattctctccacattgaatgggtgtaactgaactctcggaaatattcgtttttagccctgtagcatgaccaaagatgtctaaaatgctgataattgctgagatatcctggtgggaaggtcgcaggaacagaacaacatcatcagcatagaaaaagatacagtgtttggcttattgagaggcggctgcaggatatgcaagaagagcacctatcgtatcttccttgatgatatcccaacaaactttataaaaacgacctgtgaacccatctggcccgggagccttgtccaaaggtagatcttttacaaccgaccagacttaccataccagaactgtctagcaaaactgcaagcgcataagaggtgcaagatagtttcctgttcctggtcacataaaggacataccaccgggtgcggtaatcctcttctttgaagcctatcagcggtccaacatttattccttattaccaaccagagaaaaagtttgcatttagggggcgaccatgacttccacaaccttttccatggctcaaaggaaatagctctcataaagaacgccttataacatgacttggaggagaaatgccccgagactgaatgcgcccacacatgtttatcatcctcttgggtaagcactacccctcttaaagcatcccataactgcaagtatttgctgtagccccaacaaagacaatggattcacaatatcactaacccactgccagctatccatcgcctgagcaacagttcttgaagaagcagttctgctgcccaccatacagacaacatcagggctaaatcttgtaccgacttcccatttaaccaattatccgaccagaaaagagtattggcaccatttcctatcacagataccacaaaagacttcaagaattttctaacttgctgctgcacatgaacagtcaacccaatccaaggtctagatggatcagttttttctaaccaaagccatttagcctgcaatgcccaactcttaagctgtaaattaggaactacaagaccccctaatcttagggtgtgtttggtttgacttttggctttggcttttgccccctaaaagccaaaagccaaaccaaatggctggatccagaaagcagttttttctaaaagctgactttttcgcagtgcaaaactgaaagcacctctggacctgctttttgtggctttcagatgaaactgtgaaaacatatatcgaagaacttttaacggattttagtggtttccaccaaatggtttttagctttttaacaactcacagtccacaacagctttttccacagctcacagtccacagcagcttttttcacagtcacagctcaaccaaacagacccttagtggccttgttactatttcccaagggacaagacaacttccaccattcacctcctttcttcctttccgtagaaaccctcttcgcctcagtcttgcactgggattagagatgtcaatggggacccgatacccgataacccgtggggaattcccctattaggtacgggtatgggacaaaaattgtccccatgggtatggatatgggacaaaatctccaccccattgggtaaacgggtatgggtttgggaagcaataatccgaacccgattacccatgggtatttcatacgcgtacacctgtcctgtttgtatgaatgagttgaggccgagtcggccatcaaacccggcagactccatttcttatattggtcccaagtactgatttcttttctgatggatggatgaatggataatggttcatggatgagtgcttgccgatgtggtgatgtatgaaatctagatagtttgtgctagatgttagtacctagttattccttaatttgggatggggacccattggggacccgaaacccgaatggggatgggtatgagatgagttttgtacccatgatgggtatgggtatgggtatggggatgtgtcaaacatgatggggatgggtctgggatgctataacccgatagggaattacccattgacatctctaactgggatgctagagacggtgatctctgactttattggatccatatcaatacccaagcagaagttccccgaagccgcacagctcaaagtttactagcgaagaagaagaaatgaggaggatcaggggcaggacagggcacatgacctgtcaggattggacttgggcgtcgtaccagccacggctgttccacctgagtcttacactgccaaccatatcctgaagaattcaatcaggaaggatcaaactgttgtttcggctgtttctagtgcaatggatttcattggcaaaataagtatgaaacctgcagccttctaccaaagccaaagctcactcagaagaccttcattcccccctcttctgctactgctctgcgacgcagcaggcacgttgctgggataggagtggagtttaacatgcgagattggagctgcagagcatccaaaaaagccttgaaagccctgcacatcatcaacgaaaatgaagaagtcaataaagaagccctggatgactacgctctgcttttcaagaaccctctatcacaagctcaggtggaggccgccttatctgcactctttggctggtccacacctgcagatttgcagttccagtaacccccctggtggtagtcttgtggtttagttttctttatggatccttctaaaatattggtttggacacaagtcggccgacttgccagaccaagtcgacgactagtcgactgagaatttccagtcatctccaagtcgcccgacttgccagaaaagtcgagccgacctcaccagtcgagatcctagggccgacccaacgactagtcgccgacttgaaaactgggctggtggctaacttgtgtgtatgggcctcagggggataatgataaaattttgttcctccaggaacttagggaggtcagggctgcttgtctaggtccatggatgttggcaggcgacattaatatgatttacaagagctcagataaaaataactccaacttaaacagggccatgatgggttatttctggaaagtgattaatgatcttgccctcaaagagattcaattgcatggtcgcaagtatacctggtcaaatcaacaagacaatccagttttggttaaacttgacagggtcttttgctcagtggattgggactcctatttcccaggtgtgctccttcatagtgcagcttcccaagagtcagaccattgtccctgggccttaggaacaatatgtttggaaaaaagatattccactttgtatccttttggaccaaattggaaggctttcatgacattgtccaggctgcatgggattcagttcaaccttccagacgcccttttctgactctagaggcaaagctgaaagaggcaacaagaaaattgcagagttggagtgacaggcaggtgggacatgcttcgcaattagctttggcaagggacttactgcataagctagaaattgctcaagatgacagggctcttactccggctgaaacctggcttaaaaacaggctcaagaaacattccttgatgacggcgtcctttaaaagaacaatggcaaggttgagatctaggatttcacagctgaaggagggatatgccaataccaaatactttcaaatgcatgccagacaccgaaagaaaaagaatctgctgacaaagctgatggatggagatcgtatttttacaaattaccttgagaaggcagccctggtgaatcagttctacactaagctcattggtcagtctagggacagagagaacaattgatctggaggcccttggtctagtaaggcacaatctttctgaccttaactctcctatatctgagcaggagatgtgggaaaccatcagtcgtctacgttctgataaggccccaggaccggatggcttcacatggaggttctataaggtttgctagaatattatcaaggatgatgtgttggctgcagtatcagcagtatggagtaggaattttgtaaaccttaatagacttagcacagcctatatcacgatgattccaaaggagggagctgatcaggttaaagatttcagaccaatcagcttagtgcacagtttcgcaaaattgatcacaaaggtccttgctaataggttggaaaaaagattgaatgacatggtctcccaaaccaaagtgcatttttttaaaaggaaggttcattcaggacaattttatgctagtgcaacagacatcaaggttgcttcaccagcaaaaggtggctcggttccttctcaaactagatataactaaggcttttgattgtgtcatggcctttcttgcttgaaataaaacgacatttgggctttggaccagactggagagacatcatctgtgggttattggcttctactacaaaggtgcttctaaatgggtgtctcattctctactgttgttagaataataatacctctaatcgaacatataaggtgaccatatgtaataaaatgtaaccaaaaacacaattttattggacacgacttgtctatgaggacaagaaaacacgaaggcactgcatatgtttacgctggcttagcacttactgcgtaagttctaatgcaggctaagtctgctttacaggtccagactctagaattactttcttcttgggaaaataaggtaggattttgtttcagtaggagtagatggcatatagaaatgttactatgagctggtgacttctatttttgatccagttgagtccatgattgaaatatctgttggtggttgatgacattcagatatttacaaatctttttggaatttcttatgttggttgatgtccagataaacatttcaggtctatatacaaatcttttaggaacttctcatgttgattgatgtccaaatgaacaaaactagtaggttatagaacctaatatgttttttgcactaggtagtactacctccgttctcaaatatttgtcgcccgctagttcatttttgaactaaaacacaacaattaaaaaagaacagagggattatatatgttatgaagttttttatgagtgttatatatgaagtcacaaatgatgcccatgtcaaaggttcaaaggtggttctgatatcaccaatgacagacttaattaagtcagtctccaattaaccaactgatttggcaaggaatcagttaagcacctagcatacaacaagctatactgatagttctgagaattcttagcttccttcaaaagattattcttgtaagtatagtgcagcagatcaccaggtgatccttgatagactttgggaagaaagaatatcatcagatgatctcgtttagatgatctgggagttcacactctggactgaagctgtccccactcaccagccagatcatgctattgtattaaagctattccctagaaagcatcatttttcacccatgggatatcttccctaccatagaatttgtgaataaatttgagtaagagggttgtattctgaatcttcaaattgaggacactcaagcccccattatttctagggcaggtcactttgtcctaggtgaccagagggtttcggtgagcattttcactgttaccacaccagatacagtcccttctgatacgatcaataccattaatgacaagatcattcgaggacgtgatgagctctcccgctcccagcccctctccctcccccagcccctctccctctccccctcacacctccaccagcctctcgccggaatccactccggacccgtcgaccaactcttcggcccccaccccctcggagattgcccccagtcaggccagtcgcccgatcccccaggaggcaggacgttccaagtcctagagatggtgtgatgacgttattgatggtgactcgtcgggaggatcctcctctgcttatcattcctataaagaagctctccttcaaccttctggtcatggtggtaacgcccctgctccccctcttccccacttgaagacgaaagctggtgaccagtcagaggtgcaagggtcttctgctgaaagtcgacgtcgaaaggaggatggctggcaggtggttgagcataggaggcgccaccttcctcgtcgaggatccatagtggatctccgagggaagtgctacaagtgcctttctacctcccacctggtagcttcctgccgacgtcctacgaggtgctatcgctgcttcaagtttggccatcaagcggcaaggtgccccttgccggaagctgggcgaaagacagtgtggcagcggctgggctctggtggagatcgtactccggtgtggctgcgtttgtctggagtggacaattctggcccaacggtgatggatcgtccagtcattcagcgcaaggccccagtctggcgaaggctttcccctccagtgaactccccattagtggaaaaagaagcacagggtggcatgcttctgcctgttggacgtatgaagaagaagagaagacgttctaaacgcgggaaaggcagcttgggactgcagtcgggcccaagtcagccgcatcccaatccccctgatgctgtccagagcgccttgccgcggaaaccttcctgcgtattggagttttccactgatttggcaagaaaggaagctgctcttcggagagccttgtttgtttcggtggttggcaccaggccgatggttcgcggggatgaggtgattgaggaattggcgcgaagtttcagcatcaaccctgatgatatgtctatccagcaggccacgccggaagatttcctactattcctgcctgatgaacacacagcgacccaaattcttaacgaaggacgacctttcagaggccctggattttctctcaattttaaaagatggacaagattctctcatgcctcgacgacgtctatggcggcactggttgatattgagattcgaggaattccagctcatgcttgggatatctccacggcaaaaatgttactacaggattcgtgctgggttttggaattgttaagggattcaggaacatcatttctgctacgcgcctggtgttttgacccaaaatatctgcattcagaaatggaacttcatatcgtcgagccgggcagtgatgagcagaagaaacgatgtttgtcatacaacatttccatgacagtgtcatcggtgccctttcagatgaccaatagcactgaaactctatccccttcctctgacgatggtcagtttgatgaaggaaatgacagtgatccagctgactcccagcagcgccgccttccacctcagccacctagggaatctgttcacctttggataggcgcccagtttgtgtctggaaggagtagggcgctgtgctcggttgaggaagctgaaaggatgggcttaggcgcctcttcgggacttaatgcactgcttcaatgcggccccttgaatattgcccgacctggggagatgagatgggaatgcagctggtctgtggcgcctcgggtccttccaggcagatatgtggcgccttgggtccttccaggcggatatgcggccagccgtccattgatgcttgcgttgcccaattaaataacgcgcagctcgatgctcgggccggctccttcatatcggtggagagatcccaggagtcgccttccccttcatggaagcagtgcagacagttggctaatgaggcacgcgaccttggggtccgagctgcctcctttaaatgatgaagaaagaaccaaggtgccactagctgttgggtcgctgaatcagttgaggtcagcctcgccccagtaccatttagctgctgggccgctggagggggaccggactgattcgccccaagctactgggcctttgggatttacgggtgaagcacgccaggatgatcttgtggctgaaccggtggattgggctacgacggacctcacccatcaaatgtacatttctgagactgagaggacgaccttgactctgggcgatcatgaggttgcggacagcggaaggaagtcctcaaccgggaatttgctacaccaatccattcactgcactactggcattgaacagccagggatgctacatattaggggccttcaatcatccaaaaagctgatggtatactcacgaaaaaggttcaacagtagggacaagtctggaaatatgaatgaagaagggagtgggccaatcgcatctgtactgaggattgatactgatgaaaatacagtgtccacggtgcgagaggtcagcctagctgttactactgatgataatcagtcaacttcgcaagagacccaaacaggcagtacgcagctcaagaacaaacaattccttagcaagctctccaaaaagatttcaggcctccttgcaacaccagaagatcccccttttatgacgtctaaaaatgcccaagttgcagaaattatcccacgccgcagccgtcgaattgctggcgtgggagttgaatttgacaacatggatttatcctcaagaaccacaaagaaagttatgcaggccttgaaagtaattggggatcctggggcagtcacccagcaagccaaagaagactatctgaaagtattctccactgaacttcctatttcacatattgaagcgctggcgtccttttttggatgggtggtaccagatgatctcaaggtgggcagcattagtgttggcattagtgcctgttgagttgtcctgtagaggtcgctgatgtaagaggtttgtaatggatccaaaaaaaatcttgagctggaatgtaaggggtctcaattctacatctaggcaatgttctgttagaacttgcattgatgcttgtggcgcagacgttatctgtcttcaggaaacaaaaatgcaggaaattaacagaggaaaggtgctggctattttgggaacagattttgatcagtatgtaatgctgccgtccgagggtgctagggggggaattctgatttcctggaaaaagcatataaaggtgacagggctgaacagagtggattcttatagtatctccttgcaattccagagaaataatgggcagtcttggtggctgacttgtgtctatggacctcaaagtaattctgaaaagatcctttttcttcaagagttaaggcatttcagaagcatctgctctgagccttgggtaatagtgggagactttaatctcatctacaaggttgaagacaagaataatgataatattaatagatctatgatgggtcgcttcagaaaatttatcaatgatgttggtctgattgatactcccctaattggtcgcaaatatacctggtccaatcatcaatcttcaccaacactggtcagactggatagagttctctgcactactgattgggaagcgttgttccctaaccatctccttcaaagtgctgcttcagaggactcagatcactgcccactgattcttggacttaacagtatgtgttctggcaagcgtcgatttcatttcgaatccttttggccaaaattggaagggttccaagaggtagttctggaagcctggaattcggttaatgaaagaagttgccctttcctgacattcgaactgaaattgaaatcaactgccaaggctctgcagagatggagtgctaagaaggtaggccatgtgtcctcccagttggcacttgctagagaaattcttcatcagctggagattgcccaagactctcggctcctgtctcctttggaggtttggctcttgagagggcttaaaaaacactccttagcccttgcctccctcaaacgcactattgcccgcctacggtccagaatcagttggataaaggagggcgatgccaactctaagcttttccatatgcatgctaggcacaggcaaaggaagaactttgttgccaagattgtgtcaggggtgaacactttcactgatcacggcgagaaggctagagcagtagatgagttttatttcaaacttttgggctgcaaggcggacagatccttgactgttgatttggattacctgggtctaccttctcatgacctgactgatttagatgcgcagattgatgaaaatgaggttctggaatccataatgcaactaccttctgataaggctccggggcctgatggttacacaggcagattttataaagtttgttggccaattatcaagacggatgtgatggctgttattgctgcaatttggtgcagaaaattccagcagtttggaagacttaacactgcatttgttactcttatccctaaggagggggctgaggaagtaaaagactttcgacctatcagtctggtacacagcattgctaaacttgtcaccaagttgatggccaacagattgtcccaacgactgcatgatcttgtttctcttaggcagagcgccttcatcaagggccgtttcatccaagacaacttcatgctggttcagcagactgccagattgcttcaccagcaaggccaaccgagggttcttttgaagcttgacatcactaaagccttcgattctgtttcttggccttttttgcttgaagtacttcagagattgggtttcgggcagatttggagggatatcttaagtggccttttagcaacttcctccacacaggttttactcaatggagtttcggggaacaccatcccccacgagagggctgcggcaaggggatcccctctcccctatgctttttattttagtgatggacatccttggttgcattgtggccaaagctgatgaggaggggcagcttgagcctctctcttccaaaccactgcaccacagaatttcgctatatgctgatgacgcggttctttttttccacccaagggagagtgaaattcatactgtcctaggtattctgaatttgtttggagaagcttcaggattaaaaactaatattcagaaaagcagtgtgtatccaattcgttgtgggcaggatgagctggacatcctcaatgattggcttccttgtgaactttcgtctttcccatgcaaataccttggtctacctttgtccttaaaaaagctgtccaataatcagctgcagcccattattgacaaagtggctgatcaactttctgggtggaaagcggacctcatgacacggccaggtagaagagtgcaggttcagtacgtgatgactggcatgcttatatatctagtcatggcagttgacattcccacaggctcgctcaaagctatcgacaagatcagaaaaggatttctctggcgtgggaggaaagaggtcagaggaggacattgtttagtggcttggggaagagtttgtagacctcttgaaattggtggacttgggatttctagtcttaaagaactaggatgggccttaagaatgagatggttgtggctgcgcaaaacggatccggataagccttggtcctcattgcccatgcagatatccaacaaaataaaggcctttttctgcaccgccctgctcactgaaattggaaatgggtcctcaaccttattttggctggatcgttgggtccacggaaagaatattgaagatattgctcctcgactgcttgcagcggtaccaaaaagaattaggaacagcagaactgtgcttgaggccttgacagacaggagatggctaactgatattaaaggggccttgacagtaggtgtctttgccgatctcctagatctctgggatgaacttcaaagtgtccagcttcattcagacagggaggacaaacatattttcaggttcgctaatgatggaatttattcagcgaaagcagcttacaatggcctcttcatcgggtcgaccatggctaagtattgggaactaatttggaaaacctggtcccctcccaagtgtaaattctttttatggcttgctgatcttggaaggtgctggacagcagatcgtttgcagaagagaggtcttagccatcctgacaaatgtgtcctgtgtgaccaagagcaagaaaccatagatcacattttggtggggtgtgtttttgctaggagtttttggtttcagctgctgggacaggtcaacttatctgcctttactcctgtgatgggagaaactaaaatgatggagtggtggagcagaagcagtgagcagttacaggggattgctaaaaagggactcaattttttgattacccttgggctttggactctctggaaccacagaaatggatgtgtttttgatagagctacacctagcatggagggtgctatcagaagagctgaagaagaaattattatttggaattttgcgggggccaaacatcttgcccttattacagctcccattccaggtgtcatgtagggatctaggagtgagttcagtagttaacctcattagggaagggtgttggttggttaagtttagattgtgggggcaggttggtctagtttgctttctttcttctcctttttctttttctttttctttatatttctttttctgttgtgtttgtaattggtctaatttttagacccttcttcttaatacaatgatacgcagctctcctgcgtgttcgaaaaaaaaatatcattaatgaccgtcaccgacaccttcaaagtgcacattgcaaatatgggcattgcagagtaagtagaattgaccagaataagtcttcctgccatagataaccaggaactaatggaattgagccttctttcaactttggtgatgagagagagatagtccttgaccttcagcctcgtgaggccaattggcaaacccaaataagtgaatggaaaagtgccaatttggcatccaaacaccaccgccagctgggtggttttggtgacatcaaggttgatcaacaaaaaacatgatttgggaaaattaattttgagttctgtcgacgtgcagaacgaatgtagaattccttttaagcagaacaactccctcatcgaggccttcatgataatgagggtatcgttagcatattggatgacaaggaagttagaaggggtgatgctttcaataggagccgagagaatgtccatatctgcagctttgttgatgatgcattgaaggtccgccacaataacaaaaaggagaggtgaaaggggatcaccctgcctaacccccctcttgcaccgaattttttccccgggaggccaggataccattcaataatattgcagatgatcctgaattgagaatagcttgaacccaactgatccaattatcagggaaaccgatctgtctgtgcattgccaagatagcattgtgctcaattgtatcaaaggctttaaaaccactatttattttttggactgctgacattgatgaatatactcataagtccaagccaaacaatattgaatagatctgagtttgatgaacccatactgatttctgtggataagactcggcatcttgggctgcagtttgttggcaaggagtttggtgatcaatttgatggctatgttgaggagggaaatgggtctgtaatcattaatgttaatcaggttgctgatcttggggatcatagtaatgaaagaggtgttaagaccttcaagattggtagtcgaagaactcaagacataacttgtagaagtcatccttgatgatgggccaccaggacttcaagaatctaccattaaatctgtcagggccaggcgccttgtcagtaggcgtattctgcacaactctatcgattcaacattgtttggaaagcgcaggggaactgcgccttaaaatatattaagaagaggaaaaaaggtctatagtagaccaggattacaacatttaactccttacggaggccagtaccgcacataagtgaaagagtccaaggaagccagactcagaaaactactaaaatagaaacagtagggttcaaccatttgtcaaagaagctgccaagaaggagagacccttggccccagctaattcccaaagtcttctttcatcatcagcctgccgaaggatagaggggagactgggagtctgtccatcaaacacacatctgttacggtgattccagatcgtccaggcccctaaagagatcagcgaactcagacctttcttgaccatgccctgaactgtttcagaagctatctcccaccattccaggaaggaagtcaggcccggctggggagccaagttatccaatccgaactttctgagcagattataccagaaaatccttgcaaacacacatgagaccagcaggtgattaatagtttcaggttcttgatcacacaatggacaactgctaggatgattgagccccctttttgctaatctgtcagcagtccagcacctgttatgggccaccagccagaggaagaaacgacattttgatggagcccaagttttccaaaccctcttatagtgtccaaatgcacaggatcccaggaagagacccttgtaagctgccttcgctgaatattttccatctcgggctatactaaagatgtgtctgtcttcaatgagagggtgcagctcaaaaccagagagacagtcccagagcttaaagtaatctgccagaactccaacagtaagaccacctctaatatcataaatccatctgttgtttaacaaggcctcatgaaccgttctaatttttgctatcttctttgggattatagaaaataggctaggggcaatgatcgagatgcttttaccctgcaaccagttatcggaccagaagagggtactatgtccattacctaccatcgagacaaggactttactgaagaacgctctggctttacttggaacctgaataggaagccctgtccaaggtcttctagagtcggttttttgtagccacagccatcgcatccggagggcccatccaagttccggtagactagagatacccagtccacccagctgaagtgggcaacacaccttgccccaagccaccaaacagtgtccccctttagcttcttttcttcctctccaaagaaagccctttcttattttatctatagcatcaactgcccagtggggtatatcaattgccattgccagatacacagtcatacctgtgagtacatgttgcactagtattctcctgcctgctctggtcatcaaatcagctttccaattaggaagttggtcagcaaatttatcaacatacggctggaaatgttgcttggacagcttgtgcaaggataggggaagtcccaagtacttgcaaggaaaagctgcgatctcacaccgtagcagactttggacttccaagagagtttcttctgaacactgtatggggtagacattggatttttgcacattatttttgagaccagaggcactgccaaatagctgcaagatatcaagagtgatgggagatttcatccaccgnnnnnnnnnnnnnnnnnnnnnnnnnnnnnnnnnnnnnnnnnnnnnnnnnnnnnnnnnnnnnnnnnnnnnnnnnnnnnnnnnnnnnnnnnnnnnnnnnnnntgctgctctgtcatcaatcagctttcatagaagtgtcagcaatttatcacatacgctgaaatgtgcttgacagctgtgcaagataggggaagtacagcaagtacttgcaaggaaaagctgcgatctcactccgtagcagactgatgacttccaagagagtcccttctgaacactgtatggggtagacattggatttttgcacattattttagagaccaggggcactaccaaatagctgcaagatatcaagagagaaggagatttctttcaccgtagggtgtaagaagagggctacatcatctgcgtaaatggagactctgtgtagctgtcttcttgctgctagctgctgcaataaacctgcctcttctgcctttataaataggtgtccaaggacatccatgaccaatatgaatagcatcggtgaaaggggatccccttgtctaagccctcttctatgctgaatttgttgtccaggaaacccattgagcatgacttgtgtggtggatgaagcaaggagaccacaaaccatgtccctccagatctgtccaaacccaaactgctgcatgacttcaattaaaaagggccaggagactgagtcaaaggccttggtgatgtcaagtttgaggagcagccgagataatctttgttgatgaaacagttttgatttctgttgtactaacatgaagttgtcctggatgaatcgccccttaataaatgcactttgatttggggaaaccaactctatcgatttcatctgtagagaacgacatagtgaggtcctctaaaccttccacgggatgaaccaagtttgcaaggttgaagatcatggtggggtcatcagagacccccatacgatccttgaacaccctctagagataggcaactttttctttatgatatgagaagctaataccttcctcattggctaaggtagcaatgacattgtgcctgtgcctgtacctgtttgttgcatcagcatgaaaaaatttagtgcattcatccccaaaagtgacctatctttcagtgtatcgttgcctccagtagctgtttttgtattttagaagcatgtcaatctgagtcttgttgattgatctcaaattatttttctgaataaacagagatctttgttcttccagtttatcaatgactaaaataacttcattacaatttgtaatcaaacggttcaagttggaggtagaagatttgctccatttcttgagatcatatcgaacattcttgaatttggcaaccactcttgcaaccctggagactgttctgacctctttattccaagcattggaaaaccacctctgaaaaacctggctcccctgaaacaggttctttctggtggaaggatgttctcaggctggttgactattttagaggccatgctatgccttgtgttgaggatggcaggacagtccttctgtggcaagaagtttggaataatatctcccccaaattcacttttccttgccttttctcttttgccaggaaaaaagatagttcggttcaagtatttttggacagcatgaatctggaacacaattttcatactcctttattcctttatcccctcaggctgctcaggaatatcaagcctttcatgagattgtcagtaacctccagaattctagagctggtaaagacaaatggacctacccgtggggcaactccactttagctcatccaagttctataatcttactttccagtcaattcagccccctgcagcctttaattggatatggcagtccaaggtcggtaagaaattcaagatctttgtgtgcctggtcttcagagatagaattaactcaaagaacatcctcagaagaaagggtttcttggcatctgacagtaactttgactgcactatgtgtgacctgcactgtgaggaggcgacttatcatctactgttttgctgtcctttcagtacgggatgctggaattatgtgggtttccaatggaatcatgatcttgatttcttctcgatgattgaagctgccaagggcgcctttggtcatagctttttcatggaaattttggccctggtggtatggtgcatatggaagtagaggaatgattttatcttcaggaatgaggctccctctttttcttctgggcgatgctgcttcaaagatatgttgaagttgtaaatgctgagatttaatccctctctggtctagttggttttgcttgccctccgggcattgtactttggtcctcttggacctttttccctctcttaatataataacgtgcagttctcctgcgcgttcgagaaaaaaatacctctcttaagtctagagtgttgctttggctaaattctcgatagctacctctctgttttctttgactccgcttgaaaccctttttttcttaagttttaataaaagcgtgctgtaggggtttcccctacagcctttccccctcaaaaaaagaaagcatcatttttgaagattttcacttgatcctacatctacaaatctgatagcatttgatgtttggctgcttatcctctttttgtgtgcaggttttttggaatttaaggatgttgagatccagtgtccacatgatggtgaacttcttgttaaagtttgtatgtctgagcattgtaaggggggaggttctggcctactctacaaatgcttgcattccagtaatggaagttgattgactgggaactgaatcaacccaagcatgtatcttgatatttctannnnnnnnnnnnnnnnnnnnnnnnnnnnnnnnnnnnnnnnnnnnnnnnnnnnnnnnnnnnnnnnnnnnnnnnnnnnnnnnnnnnnnnnnnnnnnnnnnnngccggagaggcctaaggatatcaggctttgtaattcgttttccaatggaatcatgatcttgatttcttcttttagagaaaaaacggccaagggcgcctttggtcatagctgtttcctggttaattttggccctggtggtatggtgcatatggaagtagaggaatgattttatcttcaggaatgaggctccctcttttttcttctggggcgatgcctgctttcaagaatatgttggaagtaggtaaatcgtcagatttatccctctctggtctagttggttttgcttgcccccggggctttgaactttggtcctcttggacctttttccctctcttaatataataacgtgcagttctcctgcgcgttcgagaaaaaaatacctctcttaagtctagagtgttgctttggctaaattctcgatagctacctctctgttttctttgactccgcttgaaaccctttttttcttaagttttaataaaagcgtgctgtaggggtttcccctacagcctttccccctcaaaaaaagaaagcatcatttttgaagattttcacttgatcctacatctacaaatctgatagcatttgatgtttggctgcttatcctctttttgtgtgcaggttttttggaatttaaggatgttgagatccagtgtccacatgatggtgaacttcttgttaaagtttgtatgtctgagcattgtaaaggggggaggttctggcctactctacaaaatgcttgcattccagtaatggagttgattgactgggagctgagtcaaccaagcaatgtatctgatattttctgttcatatggcatagactcagcatggaaatactttgttgaagtatgtgcctcctcccccatgtatttgttgccattggttttcgttttaacttgataaatgtttgggagcctgattgcctgctgttgcttcattttgagaattgattttacttgttatattttcagtccttgaaatcagcgactactgatactgggaggaacattcgccgggagcacttgctggttattgcagatagcttgtctgtaactgggcagttccatgcattaagcagtcaaggtttaaagcagcagcgcactcggttatcgatctcgtctccattttctgaagcatgtttttctgtaagtaccatatgatttttgtactatttctttacgtgaattgcctgtttaagtcttccaggcgtattgtgagtttatcatgcttttttcagaggcctgcacaaagttttataaatgctgcaaagcaatgttcagtggacaatctgtgtggaagtctcgatgcagttgcttggggcaaagagcctttcaatgggacgtcagggccttttgaaattatgcactcgggaaaggtgtgtatctatgattgtattcaaaacattctgccatagtgacagatgcacactattttcaacacacacttcaatgcactcccagaaagtgacgatgacaattttgagggttgatgcacatgacaccagtatttacaatactgattgtgtggagtttagtttttgcagaaagatggatgcactaactatttaatattttttcttattttcgtgcccatgtttgatgattgtgtaaggataaatgtttgacaaatagtttttgatttcttttgtgagagcattaagtgttaactctgcttgatgttttgattaattaagactggtctatccagttaacattcggtggaaggctgctgctggcactgaaaattcagctccccgcccccctccatcctcagtgatcactcctgcagaacctcgtagtcatttgcctcccgttcttcgcccgcatacagaggtcagagtagtggcgcttcctttggtcgtgatcaaggcacaaatcattatgttcagggttcgtcctcctgccatggttttcgtgaagctagctgcagggatcctcaggttgtgcagaacgtgacccttgagccaccccatggctcggtcatagctccgacgccctcctttcttggacttcctgaggccggtttgcagacgcttgagtctggccaccccacactctccactcaaggttttaccgaagatgttggtggtggtttatgcgttgtgcagaatgtgatcttggagccaccccctggttcggtcacagttccgacgcttgtatctactcacgccacaacctccgctcagggtagtctcaaagttgatgatgatctcctctgcgttaagcagaacgtgaaccttgagccaccccctggttcggtcactgttccgtcgcttgtgagtgctcagacagtccggcttgattccagagctgaaggcaggaaatccctggctggaaaaccgtttaggtctacttcaaagttgcctgctgggacttatggtattagggctggcttgcaagcatccagcatggtaactaaggtttactacagaagacggctgtgtgggaagcaggaaggttctctaatttcagagcagctgcctatgttggagcttgatggtgcatcaatggctaattctgcgcacgcgacacaacttgtgggtgatcttgtgtcatgggcatcatagggagcgatcactcatgtggggccgcacctatgcgcaccaaaagcgagaggccgcagggggcgctggcagcagcgcgcgcaaggagggcacgagcgctggcagcagcgcgcgcaaggaaggcatggcaaaggaaagcgcgtacaaggaaggcatggcaaaggaaagcgcgcgcaaggaaggcatggcaaaggaaagtgactgatttggtggctaaattgatagacctaaattgtaggggagataatttcaattagtcacttgcctaattagtggttgcctagttggtcaaccggtggcctatatataggcctgtacgcaggagacaaaggaagaaggaatatattattaaaccaatctctctctcttgcaatgactctcaagcgcctagggctgctaccctagaaccaagcctgcggcagaggggtataacctcgccggagaagacagctatccccatggaccgaagatccatgacactggaccgaaggtccatgacacctggtatcagatccaggttatcctcaccaccaccagccgcccatccctcaccaccaccagccgccgcgccatcagccgccggaagcaccctnnnnnnnnnnnnnnnnnnnnnnnnnnnnnnnnnnnnnnnnnnnnnnnnnnnnnnnnnnnnnnnnnnnnnnnnnnnnnnnnnnnnnnnnnnnnnnnnnnnnccgcagggggcgctgcaagcagcgcgcgcaaggagggcacggagcgctggcagcagcgcgcgcaaggaaggcatggcaaaggaaagcgcgtacaaggaaggcatggcaaaaggaaagcgcgcgcaaaggaaggcatggcaaaggaaagtgactgatttggtggctaaattgatagacctaaattgtaggggagataatttcaattagtcacttgcctaattagtggttgcctagttggtcaaccggtggcctatatataggcctgtacgcaggagacaaaggaagaaggaatatattatcaaaccaatctctctctcttgcaatgactctcaagcgcctagggctgctaccctagaaccaagcctgcggcagaggggtataacctcgccggagaagacagctatccccatggaccgaagatccatgacactggaccgaaggtccatgacatcttggctcggcggtggtttgtactgaggcgcctgattatatcaaggctatggcaagtgctgttacatctccttgcttggtggatgcttctccctcccatgttcctacttcggatgtggttgagctcactgcggctgtggtagacacttaggtgactccagctgcggtggctcccgtgtccatatgtggggggactctctctgttgagcaggaggcgcttcattcacaccaaagacaagccttccttgcgtctgtatcccggcggccttctagagttctgcctgcttctcccatacagctcttaaaatcaggcaacaagctgcccaccaaaccaattccaagacgcagtcgcagagttgctggagtgggtgttgaatttacctctgctgaccttgacagtcgtgctactaggaaaatcatgagagcagtaggcataattaccaataataatggtttggatcagagggcgcttgatgaatatgcaaatctgttcccgacacccttgtcaggctctcatataaaggctctggcagcgaacgaatcaagctgattcatcagacgccccgtnnnnnnnnnnnnnnnnnnnnnnnnnnnnnnnnnnnnnnnnnnnnnnnnnnnnnnnnnnnnnnnnnnnnnnnnnnnnnnnnnnnnnnnnnnnnnnnnnnnnaagtcaattgtggtcacatgggttacaaattgtctttttacaaacgttgatgtatctatctttataaggagtgatggttcattagctttaaagggtgtattagatgacaaactctactttagttgatttttcgaaagaggaggtcgatctagatgcatgcttaatagctaagactagtatgggctggctgtggcatcaccgtctagcacatgttgggatgaagaacctttcataaacttctaaagggagaacatgtgttaggactaaccaatgtttgttttgagaaagataggccttatgcagcatgtcaggcagggaaacaggtgggaagcactcatcacggcaagaatgtgatgacaacatcaagacctctggagcttcttcacatggacctcttcggacccgttgcctaccttagcatcgagggaagtaagtatggtctagtaattgttgatgatttttctcgcttcacttgggttttctttttgcaggataaatcagaaacccaagggaccctaaagtgctttctaaggagggctcaaaacgaatttgagctaaaggtgaaaaagataaggagcgacaacgggtctgagttcaagaacctacaagttgaggagtatcttaaggaggaaggcgtcaagcatgagttctctgctccctacacaccacagcaaaacggtgtggtagagaggaagaacaggacgcttatcgacatggcgagaatgatgcttggagagttcaagacggccgagcggttttggtcggaagctgtgaacacagcttgccatgccataaaccggctctatctgcatcaccttctcaagaagacctcctacgaactccttatcggtaacaaacccaacgtttcgtactttcgtgtatttgggagcaaatgttacattctggtgaagaaaggtagacattctaaatttgctcccaaagcagtagaagggtttttactagggtatgactcaaatacaaaggcgtatagagtcttcaacaaatcatcgggtttggttgaagtttctagcgacgttgtatttgattagactaatggctctccaagagagcaagttgatcttgatgacatagatgaagatgatgttccaacggccgcaatgcgcacgatggcgattggtgatgtgcgaccataggaacaacaggagcaagatcagccttcttcctcgacgctggtgcatcccccaacccaagatgatggacgagtacctcaagaagtggagcgtgatcaagggggagcataagaaggacaagtgatggaggaagaagcaccatgggtccctccaactcaagtccgagcgacaatccaaagaaatcaccccgtcgattagattctgagtgacataagcaagggagtaacaactcgctcacgtttagctaatttttgtgagcagtaattcgtttgtctcttctattgagcgtttcagggtagaagaggccttgcacgatccggactggggtgtttgtgaatcatcctaggcccttttggtaatgttttggtaattaatgacaactgcttgtggactaacgattcttggagaaataagaatgcagggttggaccacatagaacaggaaatgttgaagaatcatacgcattggttgtggatcagatgaagggaaaggtataatataggtttcatttttgccggtcttgaggagtttagagaagatacctgaccggattagtaggctagatagccgtactattaagaggggtcaatgacttagatctgtgtaaaacttagtgcctcatagagcatcaagtagttgcatttgcatgaggactaacagcgcttcacatttcgtaagttaaaagttctttcaaaagcatgtttgaaaattgcgaagtcatggacgcgcggactgtccgggccttgggggcggaccgtccgcgatcctccagagggggtccgaagtctgaccacttgtgtggatactttgttctattgcactgcggaccgtccgggccttagggccggaccgtccgcagtcatgaccagagaagggtggcttcgggcagtccctgaattataggcggacggtccggctgtgatgggcggacggtccgcaagtgtcaaactcgtttttggacagggactgtgtgtttttgtagatttgtactacggactgtctgggggaccagtccggacagtactgtctcaggtctcggaccgtctgggatttatagccggacggtccgcgtgtgttaacttctcttgatccgaggctcgggtgtttcaagctgccaggtcgcggacggtccggccttgaagggcggactgttcggacccaccttttgtgtcagctctgacatgtttcaaacggtcattatagccgttatatgtacggcggacagtccggccctagggcgcggacggtccgcgtgtgcgcagaactgctgccttttgcacataacagttgaattttgatgggggactataaatagaagggtagctcgtgtgagagagctctcttggccattccttgcacacattgagctcatttgtgatcctccaactcactctctcacactctttgcttgagattgcattctagtgagagattgagggttcctagtgcatttgcatcatttggtgattcttgaggcactaggtggtacaccgagcaagcgtcattggcttgttactcttggaggttgccgcctcctagacggctcgggtgattgtctccgtcgagctctccaagaagattgtggagaagccgcggtgttgattgtgaggggttcgtgcctacctcgccggagcggcaaaggtgacattagtgaaatcgaggtattgagtgatttcttgtccacttggctcaaagatcaagtcgtgtcttgatagaggagcaagtgagagcttgaagtccacctcaacgtggattaggggtgatcggcaaatcaccaataccacgggataaatttcagtgtctataccttctcgcattacttattgccttgcaattgattagtgatttgcttattgttcttcaagtattcaatctccgtagttgtttttcatacattgtttacttattgtcactagagaatttattcctcttgttgtattgattaaatttatttagtatttttgattttagttaaaaccgtctattcaccccccctctagccggtgtcctagatcctacagtgttggccatgcaggaagagctcaacaacttcaagaggaatgaagtttggagcctagtgccatgtccaaagcaaaacgttgtgggaaccaagtgggtgttccgtaacaagcaagacgagcacggagtggtgacaagaaacaaggctcgacttgtgacaaaaggttatgcccaagtcgcaggtttggatttcgaggagacttttgctcctatggctaggctagagtctattcgaatactattaccctatgccgctcaccactcttttaggttgttccaaatggacgtaaagagcgctttcctcaacgggccaatcaaagaggaggtatacgtggaacaaccccctggctttgaggatgacaggtaccccgaccatgtgtttaagctctctaaggcgcttgaaagtcgcctagagaggggggggggtgaataggcaaatctgaaatttataaactttaagcacaactacaagccggggttagcgttagaaatataatcgagtccgaaagagagggtgaaaacaaatcacaagcgaataagagtggatgacacggtgatttgttttaccgaggttcggttcttgcaaacctactccccgttgaggtggtcacaaagaccgggtctctttcaaccctttccctctctcaaacggtcacttagaccgagtgagcttttcttctcaatcaattgggacacttagtccccacaaggaccaccacacaattggtgtctcttgctttgattacaaagaacttgggaacaagaaatggggaagaagaaaagcgatccaagcgcaagagctcaaaagaacacgacaaaactctctcttctagtcactattgctttgagtggaattgggacttggagagattttgattcactctatttgtgtcttgtattgaatgcactagctcttgtattgaatgtgttggttgaaaacttggatgccttgaagtgttggtggttgggggtatttatagccccaaccaccaaagtggtcgttggggaaggctgctgtcgaagggcgcaccggacagtccggtgcgccaccggacactatccggtgcgccagccacgtcacccaaccgttagggttcgaccgttggagcttctgacatgtgggccaccggacaggccggtggtgcaccggacaggtcctgttcactgttcgatgcaccatctagcgcctgctctgactttgcgcgcgcagtcggcactgttcactgttcacttttgtagtcgactgttggcgctgtagccattactctgcttgacacaccggacagtccggtgaattatagcggagaggcaatcccagaaacccgaaggtggcaagttcggagttgatctccttggtgcatcagacactgtccggtgccacaccggacagtccggtgtgccagaccagggcagccttcggttgtcttttgctctttttatttgaaccctttcttggactttttattggtttgtgttgaacctttggcacctgtagaacttataatctagagcaaactagttagtccaataatttgtgttgggcaattcaaccaccaaaatcatttaggaaaaggtgtgagcctatttccctttcaatctccccctttttggtgattgatgccaacacaaaccaaagcaaatatataagtgcagaattgaactagtttgcataaggcaagtgcaaaggttgcttggaattaaaccaatatacatttcataagatatacatggatgctttcttcatatttaacattttggaccacgcttgcaccacttgttttgtttttgcaaactctttttggaaaaaaatttcaaagtctttttgcaaaaagtcaaaggtaaatgaaaaagatttcgagaagcatttttaagatttgaaattttctccccctgtttcaaatgctttttctttgactaaacaaaactccccctcaatgaaattctcctcttagtgttcaagaggattttagattttagataataattttgaagaggttataccaacgaatcaagctgaatcatcagagnnnnnnnnnnnnnnnnnnnnnnnnnnnnnnnnnnnnnnnnnnnnnnnnnnnnnnnnnnnnnnnnnnnnnnnnnnnnnnnnnnnnnnnnnnnnnnnnnnnngtcttgatgaatcagcttgattcgttgattgtctccgtcgagctctccaagaagattgtggagaagccgcggtgttgattgtgaggggttcgtgcctacctcgccggagcggcaaaggtgacattagtgaaatcgaggtattgagtgatttcttgtccacttggctcaaagatcaagtcgtgtcttgatagaggagcaagtgagagcttgaagtccaccttaacgtggattaggggtgatcggcaaatcaccaataccacgggataaatttcagtgtctataccttctcgcattacttattgccttgcaattgattagtgatttgcttattgttcttcaagtattcaatctccgtagttgtttttcatacattgtttacttattgtcactagagaatttattcctcttgttgtattgattaaatttatttagtatttttgattttagttaaaaccatctattcacccccccccctctagccggtgtcctagatcctacagtgttggccatgcaggaagagctcaacaacttcaagaggaatgaagtttggagcctagtgccatgtccaaagcaaaacgttgtgggaaccaagtgggtgttccgtaacaagcaagacgagcacggagtggtgacaagaaacaaggctcgacttgtgacaaaaggttatgcccaagtcgcaggtttggatttcgaggagacttttgctcctatggctaggctagagtctattcgaatactattaccctatgccgctcaccactcttttaggttgttccaaatggacgtaaagagcgctttcctcaacgggccaatcaaagaggaggtatacgtggaacaaccccctggctttgaggatgacaggtaccccgaccatgtgtttaagctctctaaagcgcttgaaagtcgcctagagagggggggtgaataggcaaatctgaaatttataaactttaagcacaactacaagcccggggttagcgttagaaatataatcgagtctgaaagagagggtgaaaacaaatccacagcgataagagtggatgacacgtgatttgttttaccgaggttcggttcttgcaacctactccccgttggaggtggtcacaaagaaccgggtcnnnnnnnnnnnnnnnnnnnnnnnnnnnnnnnnnnnnnnnnnnnnnnnnnnnnnnnnnnnnnnnnnnnnnnnnnnnnnnnnnnnnnnnnnnnnnnnnnnnngagacaaggtccaggtcactgttcgatgcaccaatctagcgcctgctctgactttgcgcgcgcagtcggcactgttcactgttcacttttgtagtcgactgttggcgctgtagccattactctgcttgacacaccggacagtccggtgaattatagcggagaggcaatcccagaaacccgaaggtggcaagttcggagttgatctccttggtgcatcagacactgtccggtgccacaccggacagtccggtgtgccagaccagggcagccttcggttgtcttttgctctttttatttgaaccctttcttggactttttattggtttgtgttgaacctttggcacctgtagaacttataatctagagcaaactagttagtccaataatttgtgttgggcaattcaaccaccaaaatcatttaggaaaaggtgtgagcctatttccctttcaatctccccctttttggtgattgatgccaacacaaaccaaagcaaatatataagtgcagaattgaactagtttgcataaggtaagtgcaaaggttgcttggaattaaaccaatatacatttcataagatatacatggatgctttcttcatatttaacattttggaccacgcttgcaccacttgttttgtttttgcaaactctttttggaaaaaaatttcaaagtctttttgcaaaaagtcaaaggtaaatgaaaaagatttcgagaagcatttttaagatttgaaattttctccccctgtttcaaatgctttttctttgactaaacaaaactccccctcaatgaaattctcctcttagtgttcaagaggattttagattttagataataattttgaagaggttataccaatttgaaattctatcaaaaataagataccaattgaaaaaccttcttttaatgcaaatttgaaagactatatttttgaaattgctggtggtgcggtccttttgctttgggctaatactttctcccccttaggcatgaatccccaaaaacggatacttgtgagtgaaatataagcccttttcaaactatctctccctatggcaaacaatatatgagtgaagattataccaactttagagagcggtgcggagtgacggcgaaggatgaataatacgatggagtggagtggaagccttgtcttcgccgaagactccatttccctttcaatctatgacttatcatgaaatacacttgaaaaccacattagtcatagcacatgaaagagatatgatcagaggtatataaataagctatgtgtgcaaaatatcaatcaaaattcctagaatcaagaatgtttagctcatgccttagtttggtaaaagttttctcatctagtggtttggtaaagatatcggctaattgttctttggtgctaacataagcaatctcgatatccccccgttgttggtgatccctcaaaaagtgatatcgaatggctatgtgcttagtgcggctgtgctcaatgggattatccgccatgcggattgcactctcattatcacataggagagggactttggttaatttgtaaccatagtccctaagggtttgcctcatccaaagcaattgcgcgcaacaatggcctgcggcaatgtactcggcttcgacggtagaaagagctacagaattttgcttctttgaagcccaagacaccagggatcttcccaagaactgacaagtccctgatgtgctctttctatcaattttacaccctgctcaatcagcatctgaataaccaattaaatcaaatgtggatcccttggggtaccaaaggccaaacttaggagtatgaactaaatatctcaagattcgttttacggccctaaggtgaacttccttaggatcggcttggaatcttgcacacatgcatacggaaagcataatatccggtcaagatgcacataaatagagtaaagatcttatcatcgaccggtataccttttgatctacggatttacctctcgtgtcgaggtcgagatgcccattggttcccatgggtgtcttgatggacttggcatccttcatcccaaacttggtgagtatgtcttgaatgtactttgtttggctgatgaaggtgccctcttggagttgcttcacttgaaatcctaagaagtacttcaactcccccatcatcaacatctcgaatttttgaaccattatcctactaaattcttcacaagtagatttgttagtagacccaaatatgatatcatcaacataaatttgcatacaaacaaatcatttgtaatagttttagtaaagagagtaggattggcttttccgactttgaagccattagcgataaggaaatctcttaggcattcataccatgctcttggggcttgctggagccgataaagcgccttagagagtttataaacgtgattagggtactcactatcttcaaagctgggaggttgctcaacatagacctcctccttgattggtccattgaggaaggcacttttcacgtccatttggtaaagcttaaagccatggtaagtagcataggcaagtaatatgcgaattgactcaagcctagctacgggtgcataggtttcaccgaaatccaaaccttcgacttgtgaatatcccttggccacaagtcaggctttgttccttgtcaccacaccatgctcatcttgcttgttgcggaaaaccactttgttcctacaacattttggttaggacgtggaacaatatgccaaacctcattcctcgtgaagttgttgagctcctcttgcatcgccaacacccaatctgaatctcttaatgcatcttccaccctgtatggctcaatagaaaacacaaaagagtaatgttcacaaaaatgagcaacacgagatcgagtggttacccccttatgaatatcgtcgaggatggagttcacagggtgatctcgttgtattgcttggtggactcttgggtgtggcggtgcgggacccttatcatcttccttgtcttgatcattggcatctcccccttgatcattgtcctcctcttgaggtggctcttcttgatcttcattttcaccatcttgagcttgatccttatcttgggttggtgaagatgcttgatttgaagatgatggttgaccttgtgcatgtggaggctcttcggattccttaggacacacatccccaatagacatgttccttagcgcgacgcatggagcatcttcatcatctaactcatcaagatcaacttgctctacttgagagccgttagtctcatcaaacacaatgtcacaagaaacttcaactagtccagtggacttgttaaagactctatatgcccttgtgtttgaatcataaccaagtaaaaagccttctacagccttaggagcaaatttagattttctacctcttttaacaagaataaagcatttgctaccaaagactctaaaatatgaaacattgggctttttgccagtaaggagttcatacgatgtcttcttgaggattcggtgaaggtagagacggttgatggcgtagcaagaagtgttgactgctttcgcccaaaaccggtccgaagtcttgtactcatcaagcatggtcctcgccatgtcaagtagagttctattcttcctctctactacaccattttgttgtggtgtgtagggagaagagaactcatgcttgatgccctcatcctcaaggaagccttttttttgtgagttcttgaactctgtttcattgtcgcttctaatctttttgatccttaagccgaactcattttgagcccgtctcaagaatccctttaaggtctcttgggtttgtgatttttcctgtaaaaagaacacccaagtaaagcgagaataatcatccacaataacaagataatacttactcccgccgatgcttatgtaagctatcgggccgaataggtccatgtggagtagctcaagcggcctgtcggtcgtcatgatgttcttgtgtggatggtgaacaccaacttgctttcctacttgacatgcgctacaaatcctgtctttctcaaaatgaacatttgttagtcccaaaatgtgctctccctttagaagcttatgaagattcttcattccaacgtgggctactcgacgatgccagagccaacccatgttagtcttagcaattaagcaagtatcgagttcagctctattaaaatcaactaagtatagctgacccttgagtactcccttaaatgctactgaatcatcacttcttctaaagacagtaacacctatatccgcaaaaaggcnnnnnnnnnnnnnnnnnnnnnnnnnnnnnnnnnnnnnnnnnnnnnnnnnnnnnnnnnnnnnnnnnnnnnnnnnnnnnnnnnnnnnnnnnnnnnnnnnnnnttgattttttttaaaaggcttttttccccacccttttcgggttccaaaagaaaaaccccaaaaagaagtaaatgttcacaaaaaaatggagcaaccccggaggatggaggtggtttacccccctttatggaaattttgttggaggattggaggttccaccggggggaatcttggttggtattggcttggtgggcactccttggggggggggcgggttgcggggaccccttatcatttttccttgttcttggatccattgggcatctccccccttgatccattgtccctccttcttggaggtggctctttcttgatcttcatttttcaccatcttgagcttgatccttatcttgggttggtgaagatgcttgatttgaagatgatggttgatcttgtgcatgtggaggctcttcggattccttaggacacacatccccaatagacatgttccttagcgcgacgcatggagcatcttcatcatctaactcatcaagatcaacttgctctacttgagagccgttagtctcatcaaacacaatgtcacaagaaacttcaactagtccagtggacttgttaaagactctatatgcccttgtgtttgaatcataaccaagtaaaaagccttctacagccttaggagcaaatttagattttctacctcttttaacaagaataaagcatttgctaccaaagactctaaaatatgaaacattgggctttttgccagttaggagttcatacgatgtcttcttgaggattcggtgaaggtagagacggttgatggcgtagcaagaagtgttgactgctttcgcccaaaaccggtccgaagtcttgtactcatcaagcatggtcctcgccatgtcaagtagagttctattcttcctctctactacaccattttgttgtggtgtgtagggagaagagaactcatgcttgatgccctcatcctcaaggaagccttctatttgtgagttcttgaactctgtttcattgtcgcttctaatctttttgatccttaagccgaactcattttgagcccgtctcaagaatccctttaaggtctcttgggtttgtgatttttcctgtaaaaagaacacccaagtaaagcgagaataatcatccacaataacaagataatacttactcccgccgatgcttatgtaagctatcgggccgaataggtccatgtggagtagctcaagcggcctgtcggtcgtcatgatgttcttgtgtggatggtgaacaccaacttgctttcctacttgacatgcgctacaaatcctgtctttctcaaaatgaacatttgttagtcccaaaatgtgctctccctttagaagcttatgaagattcttcattccaacgtgggctactcgacgatgccagagccaacccatgttagtcttagcaattaagcaagtatcgagttcagctctattaaaatcaactaagtatagctgacccttgagtactcccttaaatgctactgaatcatcacttcttctaaagacagtaacacctatatccgcaaaagacagttgtaacccattttgcatatttgagaaacaaaaagcaagttataatctaaagatctacagaaaaacattggaaatagaatggtcatgaggatatagcaattttaccaagtcctttgaccaaaccttgatttccatccccgaatgtgataactctttggggatcatggtttttctcataggaggagaacatctttttctccccagtcatgtggtttgtgcacccgctatcaattatccaacttgagcccccggatgcataaacctacaaaacaaatttaggccttcttcttaggtacccaaacggtcttgggtcctttcacattagaaacaagcaccttgggtacccaaacacaagtctttgatcccttgtgtttggccccaacatatttggcaactactttgcctgatttgttagtgagaacataagaagcatcaaaagtcttgaatgaaatattaagttcatttgatgctattggagatttctttttaggcaatttaacatgggttgattgcctagagctagacgcctcactcttatacataaaagcatgatgagagccagagtgagacttcctagagtgaattctcctaattttgtgttcaggataaccgacagggtataaaatgtaaccctcgttatcctgaaccatgggagccttacccttaacaaaattagacagtttcttaggggcactaagctcgacattgtctccctgttggaagccaatgcaatccttaatgctaggacgtctcccactatagagcatgcttctagcaaatttaaatttttcattttctaagtcatgctcattaatcttagcactaagttgagctatgtgatcattttgttgtttaattaaagctaggtgatcatgaatagcatcaacattaatatctctacatctagtacaaatagtaacatgctcaatggtagatgtagagggtttgcaaacatttaattcatcaatcttagcatgtaacaaaacatttttatttctaagattggaaataacatcattgcaaacatttaaatctttagccttagcaattaatttttcattctcaattttaaggctagagagagatgcattcaatttgtcaatcttagtaatcaaactagcattatcatttctaagactaacaattgaatcatcacaaacatctaacttctcaaccttagcaattaatttggcattttcatttctaaggtttgagataacatcatggcaagtgcttagctcactagttaatttttcacatttttctacttcctgagcataatcatttttaaccttaacatgcttcttattttctttaattaggaagtcctctttgctatccaagagttcatccttctcatgaatagctcctatcaattcatttaatttctctttttgttgcatgttgaggttggcaaaaagggaaagtaaattatcctcatcatcactagagttctcctcatcactagatgttgcatatttagtggaggctctagattttaccttctttttgccgtcccttgccttgaggcacttgtggccgacgttggggaagagaagacccttgttgacggcgatgtttgcgacgtcctcatcggaggaggagtcggtggagctctcatcggagtcccactcccggcaaacatgggcatcgccgcccttcttcttgtaatacttcttcttctcctttcttctccctttcttgtcgtcgcccctgtcactatcacttgataatggacatttagcaatgaaatgaccgggcttaccacacttgtagcacaccttcttggaacggggcttgtaatctttccccttcctttgcttgaggatttggcaaaagcttttttaaagccatctcctcattgtcgagcttggagtcatcgatgggaagcctactcgatgtagactattccttcttctcctccgtcgctttgaaggcgacgggttgcacctcgggtgtggaggtggcgcctcgctcgatgatttgtttggagcctttgatcattagctcaaagctcacaaactttcctatcacttcctcgggagacattagtttatatctaggatcaccacgaattaattgaacttgagtcggattaagaaatacaagtgatcttagaataaccttgaccatttcatggtcatcccatttggtgctcccgaggttgcgcacttggttcaccaaggtcttgagccagttgtacatggcttgtggctcctccccttggtgaagcatgaatcgactgagctccccctcgatcgtttcccgcttggtgatcttggtcacctcgtctccttcgtgcgcagttttgagtacgtcccaaatctccttggcactcttcaacccttgcaccttgttatgctcctctcgacttagagaggcgaggagtatagtagtggcttgggagttgaagtgccggatttgggctacctcgttcgaatcatagccttcatcccccatggatggttcctgcgcaccaaactcaacaatgtcccaattgctagcgtggagtgaggttagatggtgcctcattttatcactccacatacaataatcttcaccattaaaaaccggtggtttgcctagtgggacagaaattaaaggagtgtgtttggaaatgcgaggatagcgtaaggggatcttactaaacttcttgcgctcatggcgcttagaagtgacggacggcgcgtcggagccggaggtggaaggcgacgaagaatcggtctcgtagtagaccactttcttcattttcttctacttgtcgccactccggtacgacttgacgcggagaggtgattcctccctcttcttgttgtcggattctcccgatggagccttcccgtggcttgtggcgggcttctcgccggtcaccatctccttcttggcgtgagctcccgacataacttcgagcggttaggctctaataaagtatcgggctccgataccaattgaaagtcgcctagaggtggggtgaataggcaaatctgaaatttataaactttaagcacaactacaagtcggggttagcgttagaaatataatcgagttcgaaagagagggtaaaaacaaatcacaagcgaataagagtggatgacatggtgatttgtttttaccgaggttcggttcttgcaaacctactccccgttgaggtggtcacaaagaccgggtctctttcaaccctttccctctctcaaacggtcacttagaccgagtgagcttttcttctcaatcaaatgggacacttagtccccacaaggaccaccgcacaattggtgtatcttgctttgattacaaagaacttgggaacaagaaatggggaagaagaaaagcgatccaagcgcaagagctcaaaagaacacgacaaaactctctcttctagtcactattgctttgagtggaattgggacttggagagattttgattgactctatttgtgtcttgtattgaatgcactagctcttgtattgaatgtgttagttgaaaacttggatgtcttgaagtgttggtggttgggggtatttatagccccaaccaccaaagtggccgttggggaaggctgctgtcgaagggcgcaccggacagtccggtgtgccaccgaacactatccagtgcgccagccatgtcacccaaccattagggttcgaccgttggagcttctgacatgtgggccacctgacagtccggtggtgcaccggacaggtcctgttcactgtccggtgcgccatctggcgcctgctctgactctgcacgcgcagtcggcactgttcactgttcacttttgcagtcggccattggcgttgtagccgttactccgcttgacacatcggacagtccggtgctacaccggacagtccggtgaattatagcggagaggcaatcctagaaacccgaaggtggcaagttcggagttgatatccctggtgcaccggacactgtccggtggcacaccagacagtccggtccgctagaccagggcagcctttggttgtcttttgctctttttatttgaaccctttcttggactttttattggtttgtgttgaacctttggcaccagtagaacttataatctagagcaaactagttagtccaataatttgtgttgggcaattcaaccaccaaaataatttaggaaaaggtgtgagcctatttccctttcagcactctatggactaaagcaagccccaagagcatggtatgaatgcctagagatttcttaattgctaatgctttcaaggttgggaaagccgatcctactcttttcactaagacttgtgatggtgatctttttgtgtgccaaatttatgtcgatgacataatatttggttctactaaccaaaagtcttgtgaggagtttagcagggtgatgactcaaaagtttgagatgtcgatgatgggtgagttgaactacttccttgggttccaagtgaagcaactcaaagacgacaccttcatctcccaaacgaagtacacacaagatcttctcaagcggtttgggatgaaggatgccaagcccgcgaagacaccgatgggaaccgacgggcatgttgacctcaacaaaggaggtaagtccattgatcaaaaggcataccggtccatgataggttcattgctttatttatgtgctagtagatcggacattatgctaagtgtatgcatgtgtgctagatatcaatccgactccaaggaatgtcaccttgtggccgttaagtgaattcttagatatttagtttctacgccttacttcgggatctggtatctaaaggggtctacctttgacttgattggatattcagactccgattatgctagatgcaaggttgataggaagagtacattagggacgtgccaattcctaggaaggtccctggtgtcttggagttcaaagaaacaaacatctattgccctatccaccgctgaggccgagtatgttgccgtaggacagtgttgcgcgcaactactttggatgaggcaaaccctccaggactttggctacaatctgagcaaaatcccactcctatgtgacaatgagagtgcaatccgcatggcggataatcctattgaacacagttgcactaagcacatagacattcagcatcactttctgagagaccaccagcaaaagggagatatcgaagtgtaccatattagcaccgagaaccagctagttgatatctttaccaagccgttggatgagaaaagcttttgcaggttgcgtagtgagctaaatgtcttagattcgcgtaacttggattgatctatagcatgcatgtgttttatgcctgtgatcatgttactttgaagcatttacattaattgtcatatgtttgtggtgctcaagttgtacatgacctcccagacctcacaagtccatatgcaaatggtgcacatatttagggggagaagtgctacaacttgaccctttgagactaacctttgtgtttgagtatacttgatgtagtctcaaaggagcattgaaagggaaaggtgaacttggaccatgcaaagacttccactgcactccggtattagtgtactcacctccaagttcatacttatactctcattgcctttttgctcttaattgacatttttggtgaggcaaaggggttaaagtgccaataaataattctgtttttggtgcttaatgccaaagggggaataaattaaaggccaaaagcaaatggttcatcnnnnnnnnnnnnnnnnnnnnnnnnnnnnnnnnnnnnnnnnnnnnnnnnnnnnnnnnnnnnnnnnnnnnnnnnnnnnnnnnnnnnnnnnnnnnnnnnnnnnggcattcccaccaccaaatatttaggaaaggtgggagctatttcctttcagcactcatggactaaagcaagcccaagagcatggtatgatgcctagagatttcttaattgctaatgctttcaggttgggaaagccgatcctactcttttcactaagacttgtgatggtgatctttttgtgtgccaaatttatgtcgatgacataatatttggttctactaaccaaaagtcttgtgaggagtttagcagggtgatgactcaaaagtttgagatgtcgatgatgggtgagttgaactacttccttgggttccaagtgaagcaactcaaagacgacaccttcatctcccaaacgaagtacacacaagatcttctcaagcggtttgggatgaaggatgccaagcccgcgaagacaccgatgggaaccgacgggcatgttgacctcaacaaaggaggtaagtccattgatcaaaaggcataccggtccatgataggttcattgctttatttatgtgctagtagatcggacattatgctaagtgtatgcatgtgtgctagatatcaatccgactccaaggaatgtcaccttgtggccgttaagtgaattcttagatatttagtttctacgccttacttcgggatctggtatctaaaggggtctacctttgacttgattggatattcagactccgattatgctagatgcaaggttgataggaagagtacattagggacgtgccaattcctaggaaggtccctggtgtcttggagttcaaagaaacaaacatctattgccctatccaccgctgaggccgagtatgttgccgtaggacagtgttgcgcgcaactactttggatgaggcaaaccctccgggactttggctacaatctgagcaaaatcccactcctatgtgacaatgagagtgcaatccgcatggcggataatcctattgaacacagttgcactaagcacatagacattcagcatcactttctgagagaccaccagcaaaagggagatatcgaagtgtaccatattagcaccgagaaccagctagttgatatctttaccaagccgttggatgagaaaagcttttgcaggttgcgtagtgagctaaatgtcttagattcgcgtaacttggattgatctatagcatgcatgtgttttatgcctgtgatcatgttactttgaagcatttacattaattgtcatatgtttgtggtgctcaagttgtacatgacctcccagacctcacaagtccatatgcaaatggtgcacatatttagggggagaagtgctacaacttgaccctttgagactaacctttgtgtttgagtatacttgatgtagtctcaaaggagcattgaaagggaaaggtgaacttggaccatgcaaagacttccactgcactccggtattagtgtactcacctccaagttcatacttatactctcattgcctttttgctcttaattgacatttttggtgaggcaaaggggttaaagtgccaataataattctgttttggtgcttaatgccaaagggggagaaattaaggccaaagcaaatggatcagctaccacttgtgaatttttgaaaacaatagagttagaacttttgatttgtccaaaatactcttattgcaaaatttggtctcttgtgggggagaattttgattatgggaaaagggggagtttttggcacttgatcaatttcactcttggattatctctctttatgcccaaacaagtgagtttgacttagagataagaaaatgaatttgatttgcaaaaacaaacaaagtggtggcaaagaatgatccaaatatgccaaattatagtcaaaaacaatttggtcctcattttgcattgatgttgcacttattttggttgctttttgatgtgttggcataaatcaccaaaaagggggagattgaaagggaaatgtgccctgggccatttttataatgttttggtgattaagtgtccaacacatagtaagtgagacgaatctctagaaaactnnnnnnnnnnnnnnnnnnnnnnnnnnnnnnnnnnnnnnnnnnnnnnnnnnnnnnnnnnnnnnnnnnnnnnnnnnnnnnnnnnnnnnnnnnnnnnnnnnnntacttttgatgaggcaaaccctcccaggactttggctacaatctgagcaaaatcccactcctatgtgacaatgagagtgcaatccgcatggcggataatcctattgaacacagttgcactaagcacatagacattcagcatcactttctgagagaccaccagcaaaagggagatatcgaagtgtaccatattagcaccgagaaccagctagttgatatctttaccaagccgttggatgagaaaagcttttgcaggttgcgtagtgagctaaatgtcttagattcgcgtaacttggattgatctatagcatgcatgtgttttatgcctgtgatcatgttactttgaagcatttacattaattgtcatatgtttgtggtgctcaagttgtacatgacctcccagacctcacaagtccatatgcaaatggtgcacatatttagggggagaagtgctacaacttgaccctttgagactaacctttgtgtttgagtatacttgatgtagtctcaaaggagcattgaaagggaaaggtgaacttggaccatgcaaagacttccactgcactccggtattagtgtactcacctccaagttcatacttatactctcattgcctttttgctcttaattgacatttttggtgaggcaaaggggttaaagtgccaataataattctgttttggtgcttaatgccaaagggggagaaattaaggccaaagcaaatggatcagctaccacttgtgaatttttgaaaacaatagagttagaacttttgatttgtccaaaatactcttattgcaaaatttggtctcttgtgggggagaattttgattatgggaaaagggggagtttttggcacttgatcaatttcactcttggattatctctctttatgcccaaacaagtgagtttgacttagagataagaaaatgaatttgatttgcaccaaaagcgagaggccgcagggggcgctggcagcagcgcgcgcaaggaaggcatggcaaaggaaagcgcgtacaaggaaggcatggcaaaggaaagcgcgcgcaaggaaggcatggcaaaggaaagtgactgatttggtggctaaattgatagacctaaattgtaggggagataatttcaattagtcacttgcctaattagtggttgcctagttggtcaaccggtggcctatatataggcctgtacgcaggagacaaaggaagaaggaatatattatcaaaccaatctctctctcttgcaatgactctcaagcgcctagggctgctaccctagaaccaagcctgcggcagaggggtataacctcgccggagaagacagctatccccatggaccgaagatccatgacactggaccgaaggtccatgacacctggtatcagatccaggttatcctcaccaccaccagccgcccatccctcaccaccaccagccgccgcgccatcagccgccgcaacgccctcccacccgccctctccaactctagatgcgttcactcggctcaaagagagttttggccgcttcgcagagcagtgggatcagttcgttgtgatgttccaccgctacaaggagaagacagagaaggaactccaagcagcggtgcggcttcagacggcagcgcgagggttcctggcacgccgccaggtacagtcccttcgtggggagaagcaccttgctgtggcctccagggccaccccatggccgtcatcacatgagcaggccgtggtgcgcctgcaagccacagtgcgcggcttccttgttaggcgggcggtgcggaagctgcacttgctgatcagctcatcgctgcaccaactcgcagcctgcgcacccaaccaccaggtctcgtctatactttttgaaccccctgcagaagtcgagatctaggtatgcaacccccctgcacggccaaagagggtcgtctccttcattcgggcacctgccttggtgctggacagacccaacataagaacaggctggttcctcctccacctttcatccaacgtgaaggccgcagttcagctctttccttgggatccaggaggacaggaggacatagctgcagttcaaatttaaattttagttccacaattattttgtattttcgtcttaaataataaaggtaagccgagatgtaaaaggcttaaccttaagtcatgttaggtaagtctatggcagctcgaggacgagctggtcctcaagggagggggagatgtcatgggcatcatagggagcggccactcatgtggggccgcacctatgcgcaccaaaagcgagaggccgcagggggcgctggcagcagcgcgcgcaaggagggcacgggcgctggcagcagcgcgcgcaaggaaggcatggcaaaggaaagcgcgtacaaggaaggcatggcaaaggaaagcgcgcgcaaggaaggcatggcaaaggaaagtgactgatttggtggctaaattgatagacctaaattgtaggggagataatttcaattagtcacttgcctaattagtggttgcctagttggtcaaccggtggcctatatataggcctgtacgcaggagacaaaggaagaaggaatatattatcaaaccaatctctctctcttgcaatgactctcaagcgcctagggctgctaccctagaaccaagcctgcggcagaggggtataacctcgccggagaagacagctatccccatggaccgaagatccatgacactggaccgaaggtccatgacatcttggctcggcggtggtttgtactgaggcgcctgattatatcaaggctatggcaagtgctgttacatctccttgcttggtggatgcttctccctcccatgttcctacttcggatgtggttgagctcactgcggctgtggtagacacttaggtgactccagctgcggtggctcccgtgtccatatgtggggggactctctctgttgagcaggaggcgcttcattcacaccaaagacaagccttccttgcgtctgtatcccggcggccttctagagttctgcctgcttctcccatacagctcttaaaatcaggcaacaagctgcccaccaaaccaattccaagacgcagtcgcagagttgctggagtgggtgttgaatttacctctgctgaccttgacagtcgtgctactaggaaaatcatgagagcagtaggcataattaccaataataatggtttggatcagagggcgcttgatgaatatgcaaatctgttcaagacacccttgtcaggctctcatataaaggctctggcagcgctgtttggctggcagcctcctgaagacatgtagttgctccctttgtcttcttcggtcgctccctgcacccttaagataaatggatccagaacgtgttctaatctggaatgttcgaggattaaactccccagctaggcaagcttctgttcgttccttagttgattcggctagaatagatatcgtctgtttgcaagaaaccaaaatggatgttattagtcgtggaaccctcctttctgccttgggttctaattttgatcgccatatcgagctccctgctgttggtctctggaatgaattctggtggcttggaagcactgagtggataccactggaggacgaatctctagctatgcagggaacttggggcnnnnnnnnnnnnnnnnnnnnnnnnnnnnnnnnnnnnnnnnnnnnnnnnnnnnnnnnnnnnnnnnnnnnnnnnnnnnnnnnnnnnnnnnnnnnnnnnnnnnctctggatagatgcggtagtttgaagcgcctgataattcggtatggcagtgctgtgatttcatgcgacgggggcctctactgccttctctactccggagcgtttgtctgatcgcgagctggtggacgttagcgactccagctgcggtttctcccggacctccagcggggggactctatcatttgaacaggacgcgcttcattcacgccaaagacaagcctaccttgcgtctgctcccggcgcccctctaaaagtctgctcgcttctcccatacagctcttaagtcagccaacaagctgcccaccaaaccattccaagacgcagtcgcagagttgctggagtgggtgttgaattaacctttgctgaccttgacagtcgtgctactaggaaaatcatgagagcagtaggcataattacccataataatggtttggatcagagggcgcttgatgaatatgcaaatctgttcaagacacccttgtcaggctctcatataaaggctctggcagcgctgtttggctggcagcctcctgaagacatgtagttgctccctttgtcttcttcggtcgctccctgcacccttaagataaatggatccagaacgtgttctaatctggaatgttcgaggattaaactccccagctaggcaagcttctgttcgttccttagttgattcggctagaatagatatcgtctgtttgcaagaaaccaaaatggatgttattagtcgtggaaccctcctttctgccttgggttctaattttgatcgccatatcgagctccctgctgttggttccagcgggggaattctggtggcttggaagcactgtgtggataccactggagagttgtatgtgcggaataatagtgtctcggtgcagttatgcaattgcaatgggagaacttggtggctcacttgcgtgtatggaccacagggaaatagtgaaaaagtcctttttttgcaggagcttagggacctgagattgctgtgtcatggcccttggatgattgatggtgatttcaacatgatctataaagctgaagataagaataatactaacataaaccaagttatgatgggaagatttcgtagcttcatcaatgatcttgccctaagtgagctccctttaattggtcggaaattcacttggtctagtcagcagaatcccccaaccctagtgaaacttgacagagtattatgcacattagactgggtggatttatttccaaattccttgcttcagagttctgcctcaaatgactcagaccactgccccctccttttgggcctgaatgataatagtatggcaggaaggcgccgatttcattttgagtccttttggcctaagtttgagggatttctggaggctgtttcgttggcttggcattctgttccagctgtgcagtgtccttttgcaactttgaactctaaactgaaagctactgctcgtgggctgcaggcttggagtgctaaaaaggttgggcatatttcagcctctttagcccttgcccgtgtgctcctgcaccagttggaaattgctcaagacagtcgtggtctttcctcagctgagctttggtttctcttatgccttaagaaacactcccttgctctatcttctcttcgaaggacaattgccaggcttcgttccagaattgggtggctgcgtgagggtgatgctaataccaaattattccacatgcattcaagattccgcaagaagaagaattttgttcctaaattagtctctaatggtgctgtccttaccggccatgatgccaaggctgatctggtcaatgaatcccacatggatccggaaaaaataattgtttggaatgttagaggtcttaattctctagctcgacagaattctgtttgtgagctccttaattgttatggagcggatataatctgtcttcaagaaactaagatggcacaaccttctccgcgtgctctcctctctatgttggggtctgattttaccggttcattggccctgccttctaatggttcgaggggtggaatccttattgcttggagacgacacttggggataactggagctaccaggacagacatccatagtatttctgtgcagttttgttcagtggagggacaccagtggtggcttacttgtgtgtatggacctcaatctaatgaagccaagattgaatttctgcaagagctgagacatattagagcagcttgtcagggtccttggatgattactgggatttcaatctcattttgcatgccgaggataaaaacaactcacatattaatcgggctatgatgggtcgattcaaaaaattggtagatgatctcgctcttaaagaaattccactccatgggcgcaagtttacttggtctaatcagcagaatcaacccactcttgtcaaacttgatagagtcctgtgctctattgattgggaggagctgtttcctggtgcagtgttacaaagtgcggcttctgaagattctgatcactgtcctttattattgggtctcaaagattgcaaaggtgttaaaaggcgcttccattttgaatcattctggacgaaaattgaagggttccacgatgtggtgcacaacgcctggaattcggttcctgttggccactgccccttctccacttttgatttaaaactcaaagggacagccaaagcccttcaaggatggagcagcaagaaggtggggcacattgagactcaactgcatcttgctagagatttgatccatcaacttgagattgcgcaggatggtcgtattctgtctgtgttggaaaggtggctgttaagtaaattgaagaagctcgctctggctttggcctcaaccaagcgtaccattgcccgccttagatcaagaatttcttggctcaaggaaggagatgcaaattctaagttgttccattcctttgcacggtacagaaagaagaaaaatagtgtatccaagcttactgttggaaatcaagtccttactgctcataatgacatagctgcagcagtggatcagttttactttgatttaattggggctagtaaagacagaaatatttcgattaaccttgaggctctggaaactgctggcactccatctccaaatttgatcgagttgaacagccccattactgagcaagaagtgtgcaatgctataaattctctgccctctgataaatctcctggaccagatggatttactggtagattttacaaaatttgctggtccattattaaagaggatcttatggctgcggtgattgcgatttggaacagaaaatttgataattttcataagctgaattctgcttttatcattctaatcccaaagaaagataatgctgatcaagtcaaagattttagacctatcagccttgttcacagctttgcaaaactaatcacaaagatattggcttctcgattggcttcaaggctcaacgatttggtctctccaaaccaaaatgccttcattaagggtcgctttatccaggataatttcatgttggttcagcagacggctaaattacttcatcaacaaaggcatccttgcctgatgctcaagctggatattactaaagcttttgattcggtttcctggcccttccttattgaggtcatgcagaatctagggtttgggcagatctggagagatatcattttagggctgcttctcacttcctctactcgagtgttagttaatggtcatccgggaagcataatttctcatagaagagggctgcgacagggggatcctctttctccgatgctgtttgtgcttgtcatggatgtgcttggtcaacttgtctctaaagcagatgaggaaggtttattacaacctctttctactaggcagcttcaacaccgggtttctctttatgctgatgatgtggttctttttattaatcccgtggcagaggacatgactatggtttcagacatccttcagctttttggtgaggcttctggtttatataataataatcaaaaatctagtgtctaccccatcagatgccatgaagacaatttagagattattcaacagttttggccctgtgagatatctagctttccttgcaagtaccttgggctgcccctgtcgttacataaattaagaagggagcaggtgcagcccattgtggataaaatagctaatcaactacctggatggaaagctgatttgttgactaaagcaggaagaagtgtattggtgcaatctgttttgacaggggtgctgatttatagtgttatggttgtagacttgccttctactactttgaaggacattgataaaattcgaagagggttcctttggcgtggtcgtaaaaatgccatgggtggccattgtgaagtggcctgggggctggggcagtgtgtgcagacctcgagagcttggtagattgggtattttcagcatcattgaactgagttgggcccttaaaatgcgttgggcttggctgcaaaaaactgagtcaggtcggcccttggcatccctgcctttgcataccccgaaaaaaattcgagagtttctacaagtagccttgtattctgagattggaaatggaacttctacccttttctggagtgatcgatggttgggtgggcagcggattggggatatcgctccccgacttattgagaccattcctaagaagctgattaacaaaaggacagttcaggaggcgatcgaggataatggctggattaatgatattcctgggagtttatctgttggtgcacttgcagacttcctgcgtatttgggatttggtggcacatgttgatctggacccccataaggaggacaaacatatttttcggttggctgctaatggcaaatattcgactaaagccgcttatgaggggctcttcattggatctgtggagtttgaaccttttgagcggatttggaaaacttgggctccgcccaaatgtcgattcttcttgtggctggtggctcacaagaaatgttggacaacagatagacttgagaagcgggggctggatcatccggaaaaaatgtcctttatgtgagtaggagagggagacaattgaccatctgcttgtgaattgcgttttctcaagagaatgttggttcctccttctaaggcaattcgggctgcagggtttggccccccaaccaacggatattaattttatggagtggtggcatcaagcaaatgaagctattcaggggtccttcagaggtggcctaaactccctcattatgctgggcgcttggattttgtggaatcaccggaacagatgcatctttgatggtctttcccctaatgttgctaatttcctaatccatgtgggggatgagcgccgtctgtgggagactgccggggccaaggggttgacatcccttgttgcctccctctctcatgtagcctagagttttatagatgagtcagtctatgctagtttcgttcaggccaccgtaaggcgtcagttgtaccccggtctattttagaccttgtttatttcttcttttaatataatgatacgcagctctcctgcgtgttcgagaaaaaaacaatgcagcgatagagagcaaactatctctctggaaagtttgggaattccttgtcatgatctgtcagccttagatgcaccattcactgaggaggtatgggacacaattttacaccttccttcggacaaggctcctgggccggatgggttcacagtcaaattctatagagtctgctgggagattattaaggctgatgttatggctgttttctcggcggttgggagcagaaggttcgctaattttcagatccttaacactgcttatatcacccttatcccaaagtttgagggggccgatcaagttaaaaatttcagacctatcagtttagttcatagtgttgcaaaattgctcactaaactcctcgctaatcggttggctggaagacttcatgatatggtttctcctaaccaaagtgcttttattaaaggccgcttcattcaggataattttatgttggtgcagcaaaccacccgctatctccatcaacaaaagcaacctaggatgcttctaaagcttgatatctcaaaggcctttgattcagtctcatggcccttcctcctggaagtcttgcaacatttgggctttggccaggtctggagagacattattagtggattgctatggacctcctcatcttaggtgatacttaatgggttacctggacaacctattcttcatcgtcgcggtctccgacagggggatcctctgtctccttttctgttcatcttggtcatggacactctgggcttcctgattaataaggccgcacaggatggactgctgcagccccttgctcctcgggcattgcaacaccgggtttttctctatgcggatgatgtggtgatctttcttcggccggcagccttggatatcaatgttattctggattgtcttcagctgtttggagatgcttcgggtttacgtacgaatgttcagaaaagcagcgtgtaccctattagatgtggagatcaggaccttgctttgctgcaaaatatgttgccttgtgagttagctgaattcccttgccgctatctaggtttaccgcttgccattaaaaagctttcaaaactccaagtacaacccatcattgataagattgcaaatcaactatctggatggaaggctgagttattgactaaagctggtcgtaaggtgcacgtccagcatgtcctcacagggatggtgatctacttggccatggctgttgaccttccagcttgggcccttaaagccattgataaaattcgtcgaggttttctgtggcgaggccgaaaagatgtaaaaggtggtcactgtcatgtggcttggggaattgtttgcaggcctcgcgaattgggtggtctaggcatttctagcatgaaagaacttgcatggtctcttagaatgcgatggctttggctggctaaaactgagccatctcgcccgtgggcctctcttgctatccaggtccctaaaaaggtcaaagatttcttctccatggctatgcaaactgagcttggtaatggggcaacaacctttttctggactgataggtggttatcgggtcacagaattgtagagttagtccctcgattatttgggatcattcctaagagacgggttagcaagagaacagtggtggatgctatctctaatcagagctggatttctgacattcaaggagctctttctgttggaattatcaatgaatttctcattttgtgggatttaattgactcaattgttttaagacctcaagttgaagaaacatttcttccgtctagctgcaaacagaaagttctcctcaagggaagcatataggggtttctttttgggatcttctgagtttgaaccttttcatagaatatggaaaacttgggctcctccaaaaaccaagtttttcatgtggttggtcgcacgcaggaaggtttggacagcagacaggctgcagaaaagaggtatggaccatccagagagatgtccactatgtgaccaggatcaagaaaccttggaccatatgttgatcggatgtgtctttgctcgagaattctggtttaaattgcttcttcaagtgaacctgccgtttcttgccatctgaggatagtgcttttcttgaatggtggagaacgttatgtaccaaagtctctggaattgcaagggacggcctcaattctctagtcattctgggagtttggaccttatggaagcaacgcaatggctgtgtttttgacaataagagccccagtattgctgatgctattagaagagttgagttggaggttcacctatgggagatggccggtgcaaagaaattatctttgctcaccgcccccatttcgggcatccctgctagttagctagcattgtggtaacttgtgttagtttcttatttagtcatggatgggtttctgtatgcctgttactggccgccataggcgcctcagttgttttttctgtaactgtccttcttctttaatataatatcgcgcagttctcctgcgctttcgagaaaaaaaaggtgatctcttgactgatatagttttctaaattcaatctaaccagcaattacgctgatgtatttggttgtggctgatgaaaataaaccaccatcttaaatatacttgtaggatattcagttattgaatttaatgctgacagttaccgtattttgcagccacatgaaccagaacaaaatgagagcatctatgatttcctatgcagctctaaagttcggaattttgaaaagaatcatttggatacccgtagacaaagtactgaaaatgcttcgatatgtagattagcatgcaagtcttctaaaggcagtacgaccgtcaatggtgttgctataactatcgaccaggactttcttcatgctaaagtcagtatatgggataacattatcgatatgcgtacttccttacaaaacatgctaagagagtaagaagacatcctcctccatggagctattttactggtttattttggcatgacttatgcataaggatttgcttttttaaaaatatatatattgattatcctttattgaatttcttttaattgtatgatgaaggtacccgttaaatggatatgtggcggagccagataaatcacagttaatcgaggccctgaaatttcattccagaggtgctgaaaagatcggtgtgggagtaagagaaattaagggtgatgattatcgattgatacctgttctttttctctatcaaacacactggatcttttattaagaaagaaaaaaaaaannnnnnnnnnnnnnnnnnnnnnnnnnnnnnnnnnnnnnnnnnnnnnnnnnnnnnnnnnnnnnnnnnnnnnnnnnnnnnnnnnnnnnnnnnnnnnnnnnnnaagggacggcctcaatctttagatcaatttggaagtttggacctgatggaagcaacgcaatggctgtgttttgacaataaaagccccagtattgctgatgctattagaagagttgagttggaggttcacctatgggagatggcccggtgcaaagaaattatctttgctcaccgcccccatttcgggcatccctgctagttagctagcattgtggtaacttgtgttagtttcttatttagtcatggatgggtttctgtatgcctgttactggccgccataggcgcctcagttgttttttctgtaactgtccttcttctttaatataatatcgcgcagttctcctgcgctttcgagaaaaaaaaggtgatctcttgactgatatagttttctaaattcaatctaaccagcaattacgctgctgtatttggttgtggctgatgaaaataaaccaccatcttaaatatacttgtaggatattcagttattgaatttaatgctgacagttaccgtattttgcagccacatgaaccagaacaaaatgagagcatctatgatttcctatgcagctctaaagttcggaattttgaaaagaatcatttggatacccgtagacaaagtactgaaaatgcttcgatatgtagattagcatgcaagtcttctaaaggcagtacgaccgtcaatggtgttgctataactatcgaccaggactttcttcatgctaaagtcagtatatgggataacattatcgatatgcgtacttccttacaaaacatgctaagagagtaagaagacatcctcctccatggagctattttactggtttattttggcatgacttatgcataaggatttgcttttttaaaaatatatatattgattatcctttattgaatttcttttaattgtatgatgaaggtacccgttaaatggatatgtggcggagccagataaatcacagttaatcgaggccctgaaatttcattccagaggtgctgaaaagatcggtgtgggagtaagagaaattaaggtgatgattatcgattgatacctgttcttttttctctatcaaacacactgatcattttattaagaagaaaaaaaaggttgagaaacctatacggcagcaaacccactcacaccaaatagaataagcggatatgttaattttgatcattgtgaaatcatgagctgcatgagaagatatcctattttgattacgttcttgtgtatatgtgcttgtcatttggtcaagcctattgtccatacattagtgttagaaaaatgccactgacatgctgttgaatctactggaaacacattacgtgcattaaatttgacctttatacaatatcgtcgtcagccttgcaagcattgtaaaagcttctcgtggttgagcaaacaataatctttcctcaccgagcagatggccctttgtcaaattacaccttgatatatatccctgtttattgcaaaattgcatgctgtaaacgtgacgtgaaaagtattaggcagtggtcgtgccttttttttttctgaagtcgtgaccattcttttaacatcccgtcttacgtgcagatcgggttgaatcctagtcacccaggtacaaggtgcttcattttgctgagaaacgatgataccactgaagacttttcttaccacaagtgtgttcagggtgctgcagactctatctcaccccagctcggaagttatttgaagaaactatattacagagcataagcttatgcaacactcccactagttcatttttttaactaaaacgtggcaaataaaaaagaacggatggagtaggattttggaaagtgttcctggcaacatcttgttctgatcagaccatattaccaatttctgataaggaaactacgtgtcgcattttaaggatgaggtgaaaactgaaagggtctggcgctcagaactcagaaggtcttctggactggaggtgtatgtcaactcaactcaatgggactatgtaaggtgggcctgagtcatgactgcggtttcatgcctgcaattctctagtcagtagtataaatactagtctgcgtgttttctaatatgaagatccatctattttattacttaaccatagcgtagatgattggtaacagatagatacattttatttactgattaaaatgcagcagcgactccccgaacttaaaacaggtaaacgggtgtggaaacttagtggctcattcaaaactgtctaaaatcgggtttgctcaaacaaagtgtcgacatggcatgtcatgttgaaatcatttgagtctctaaatttggtttacagacttttattagtgtgcttcaatcgtagcacaccaaatcagtattcggtttgagcatccgatttctgatggttttgcacaggccggccaagttatatgatctagttttttaacttaggggatctaattgatacaacatgccaagtttaagaatggctattgtatcttactcttatttattgaacaagtaatgcacattcccagtc

SEQ ID NO: 688 - DNA, 10166 bp, Zea mays
  source 1..10166: mol_type = genomic DNA
atcgaccgggcacgctcatccccgctggcgaggataaccgggatggagacgagggccacccagcggcgctgcggcggctccgcctccgcctccgactccgcctcctgacgggcacgcgacgacgactccgccgccgacatgtctggcgcgagcagcgtgaggcgatgcggctgcactgactgcagtacttgggagatgggggatgggagggtggcgagggcgcgaggcggttggttttgggggttggatttgaattgatccgtgtgccgtgcggtgcgtgcctgctacaggacagggaaggggattttataggcaggggcatgagaagggcttgaggtagcgatggcagcgtcggcgtcgacgactgggcagccgatgggtcgggccggcgtgctgtctgctcgactgctccgctgcttggcgcttgcacagcagcacggtcctcgtcctccatgaagccgagcttcttcatgagcacttggcgagccgtcggccgtcgcctgaacatcggccagcggccaaggcgccgctgcaatgaggcgtgccttttcccacgccttgccgccatcgccccccgccccgctgcgatggtccttggagcagcggcctgcgtggccgtgttgatgagagtggccggtgtcgtggtagtcgtcgtgcgttgcctgcgtgggttgcgcgcgcctgacgtagaagacgcacttggggcggatcgaaccttagttctgttccggccgggtacccaagaggacgcgccctggctggagcgtggcgactgcctgacattgttagcttttttcccttttaaaaataacaaggatcagataatcaatcgtaatttttgtaccacggccatcacaccgcaaattgcagaacacttcaacatgttgaaacacttttttgcagtgtaatgcggaggaaagctgaacaaagctactcacatttttgactggaaaatgggtgcaagcacaagtgcatgactctacctgcatgcagtgcagggctcatgcatcatgggtctctgttggttggactagcaaacacgacccgaatatataagcaggagacctcttctgactgaaacccttctgttgttggttgggtagcgatcatcttgctcccgctagctgccttcccccattcccagctcctactcaactccactcaacaacctagaagccgcatcatctgcttcttcttcgatcttctgcctggttgcctacgtctgcatcgtcgtgttcgctgcttcacctgaattcacaccccgtcctgtctgctgattcttggacagacaagacgccattgaaatggagggcgacgatccgacagctgctggcccgaccgtcccagaggcctccatccgccgggtcaagctcagcgtcgcaagcaactaggagatcgtaagcaccgtcctcctcctcgtcgtcgtccatccccttcatgttgtcttcttccatcaactctcgctgtctgttagctcatgctcatgcatcttcttctccgatggacaacacccatcatctctggcccgcagaagctcatggcgcagctggtggagaatcccatcctgatcacgcactgcagccagctccacgacaacccatccctgggcctgcccctgcaggtcggcggcagctgcgagtcctactgctgcagcgccacgcagctcgacaattgcgaagggcatttcggcttcatcaagctgccggtgcccatctaccaccccagtcacatcaccgagctgggaagatactcaacctcgtctgcctccgcctcaagaaacccaaggtacaagaaccctgtctgccacatttcagagaaacatatccgttacagttgttgcaaacataatgactcatcacatgcttccttgtcttttttgtctattattctcaagcagaaggacaccgggaaagaatgcagattcacctcatgttcatattgccaggtaagccatagcaaacttattgttcatacaaatttgctcacttagtcacccacttgagctacattattggttggaaatttctcatgttcagcacattcctgatgtgaaaaaagtacaatctggatccctactttgcttgaacaatgaaatagtgctgctcttacaaaccccagcattcctcttgttccaggacctcccaccgctatgcgtcagtcaagtgaagaaattcaacggtgcccgtagcttggaactgaaagcaccattaaagcaagaggttgccgtcaggttttggagcttccttgatcaatttggcttccacacaagtggtacatctcaccgccgccccttacatccaaaagaggtattcggggcaatatctacactcctgaaacctttccaatgtactcatagcttcttcagagggactcacagcttgttcttcaatttcgtaggttcaggacataatgaagaagataactgaagaaacaagagctaggcttgctgctatgggtaccatcttcaggatggatatgtgatggataacatgtccgtcccacccaattgcctgcacgtttcaaatattttagatgacaacacagaaatgtgccctcccgtaagtacctcctgataaaacaatgagattacctgtttgcataagacaccctgtcaagggcgtcgagcccctgggtggccggaccgcggctacgcagttcgtagccgtcggccgtcttctccggtgaggttattcccctcaaccgtaggcttaacagagagggagagatttgggatataattcctgcttgctttattaaaagaaccgcctgctttatatatagccaggccagccaaaccaactcctatttcttctctatacttatcttcctaaacaacttcttaacaacttatccctatttgctagcagcggccagctctgatctgttgctggccgtgagcttatcttctaaacaaccctccaattttctagctactagcaactgcagctattcctgcgccctgatctgctgctggccgatatcttatccaatggaacctgcggctgttgcctcttgggcgtgttcagcgcgctcacgcgcacgccgtatgtcacgggtacgccgttgcctgacgtaggggcggccgtacatgacatctctcccctcctcgaagaccagctcgtcctcgagctggaacgctggatgccgggtgcggaagtcgtcgacgtcctcccaagtcgcagactcggccggcgcgccgtgccactgaacaagcacctggcggacaccgcgtgccaggcgagcccgcaccacccgggctggttccggcaccaccgcaccatcgatggtcggaggcagggcgggtggcgacgatggtggcgctcccacaaacttttttagcacgccaatgtggaacacatcatgaagacgagcgccggcgggaagctccaagcgtacagccacgtcgttgatcaactccgtgacgcggtacggcccgacgtaacggggcttgagcttccctgctaccgtgcgcggcagtgaggcagctgcgcgctggcgtagccgtagaagagcccagtcgccaacctggtaggttaccagccggtgcgacttgtcgtagtggtgcttctgtgcggactgcgcctgctggaggcggtagcatacgtccgcgaggaaggcctcccttgcctccatctcttgagctaccgcctcgacccttgtctcgcccggttcgtaagaacggattgagggtgggtcacggccgtagaccacccggaatggcgtgtcacggagggaagtctggtacgcggtgttgtagatgtactcagcccatggcagccagcgcagccattgccggggacgatctcccgtgaagcagcgcaggtacatcacaatgacgcgatttgccgcctccgtctggccgtcggactgtgggtggaatgccgaggacatgagtagctttgttcccatgagcctcatgagctcactccagaaagaggacgtgaacaccgggtctcggtcggagacaatggactgcggtaccccgtgcagcctgacgatgtcggtgaagaatgcctgtgccacggactcagcggtgtacgggtgcgccagtggaatgaagtggcaatacttgctgaagcgatcgacgacggacaggatcaccgtcttgccgtgcacgcggggcagcgcctccacgaagtcgaggccaatgtccgcccagacgacggaggggatcggaagggggtgcagcaggccggcgggatgaaggtgctccgacttgtactgctggcaagttgcgcacgcccgcacaaagtcctgcaccatgcgcctcatgttggggaagtgaaagtcgcggcgcagccggtggagtgtgcggtgaacgccctcgtggccgtctgcgtggacagcggtaacgatctccggcagtagaggggaggcggcggggatgtagaggcgcccgtcgaatgtgaccatgccgtccgtcacggcccacggggcagcgcgtgtgccggcgcgtacctcatcgtggacagccaccaaggcgggatccatggcctgggcatggcgcaagcggctgatgaagtcgaaacggggcgctgagatagccaacagctcaccttcctcggtgtttcggcgagagagcgcgtccgccacgacgttagtcgcacccgacctgtactcaacagagaagtcaaagcccaacagcttcccgacccaatgatgttgtgggatcgtggccaggcgctggtcgagcaagtatttcaagctatagtgatcggtcttgacaacgaactgccgaccccagagatacggccgccagtgccgcaccgcctggacgaggccgatgagctcacgctcgtaggccgcgagagcgcgatgccggggggcgatgggtctgctaaagaatgccactggatggccctcctgtaccagcacggcgccgaacccatgtgacgatgcgtcacactcgacgatgaatatcttcgcgaagtccggcatggccagcaccggagcagatgtgactgcggccttgagggccgcgaatgccgcagccgccccgtcatcccaggcgaagccatccttcttgaggagcgcggtcagcggggccgccaccggcccgtagttgtgcacgaatttgcggtagtagcccgccaatccgaggaagccacgcaccgcgcgtaccgaacgtggagctggccagtcgacgatggcctgcaccttggctgggtccatggccacacccgccgccgagattacgtggcccaggtaggcgacggacggggcagcgaacgcacactttgtacgcttgacgaagaggtggtggcggtgcagctcgtcgagcacggcgcggaggtgtcgaagatggtctgcccatgtcttgctgtatatgagaatatcgtcaaaaaagacaaggacgaaccggcggagaaacgggcggagcacgtcgttcatgagcgcctggaacgttgctggcgcgttgcagaggccgaacgccatcaccaggaactcgtacagcccatcgtgagtgcggaacgccgtcttgtgaatatcttccggacgcatgcgcacttggtggtaccccgaacgcaggtccagcttggagaagtaccgtgccccatggagctcgtccagcagctcgtcgaccacgggaatgggaaaggcgtccttcaccctgagcgcgttgagggcgcggtaatcaacgcaaaagcgccaggacccgtcgggcttcttgacgaggaggaccggcgacgagaagggcgagtcgctgcggcgtacgatcccttgctccatcatggcggcgcactggcgttccagctcgtctttgtgggcagccgggtaccggtatggccggactgccacaggctgcgcgcccggcgtcagggtgatgcggtggtcgtgggcgcgctgcggtggcagaccggtcggctcggcgaagacggaactgaaggagtccaggagtgcgtcgaggaactgctcgctcgccaccgtggcgctgattgctgtgggactggcagccgagacgccggtccagcatatcgggcgcccctggaattggaacttcatgcgccggctgcccaggtcccacacaataggacccagcgcgcccagccaccgtgtgccgaggacgacatcgtacccagcgagcggcatgacgtagagatcggccgggaacggggtaccgtcgatggtgaggggggcgtcacggaggaccccggcgcaggtcacgcgctcgccgttggcgaccatggcggtgagacgtggccgctggtgaaggggcagacccgtgcgccgcgccgccgcctcggatatgaagttgtgggtgctgccggaatcgaggagggcgaccagcgaggcagcaccaagcgcgacggcgatctgcatggtgtcagccacaggcaccccggccagggcctgcagggagaaacagggggcctcaccgtcagcgtccggaggctcgtcgttagtgtcttcaatctccacgccctccatgaaaaaaatacgtctgcaaaaccggttgtggccacgcgtgtacttttcattgcagttaaaacagaggcccatgcggcgccgctccgccatctcgtcgggggtgaggcgccgttgattgtcctcgccacggccctgctgggtggccctcggtggtgcagggagcgccagcggctgctggggcgctggaagcgctggacgtggcgccggtgcggacagcagaccgcgcgggggcgcccgaggtgcaggctgcaccagccggtcggcctccatcaactccacttggcgcgccaggctcatggctgatgcgagcgactccgggttgtggatgcgaacgacatggctgagtggtggcagcaggccgccggtgaagagctggacgcgctggtgttcgtcgagacgaccggcgcgagggagaagggcctggaatctatttgcatactcttccacggtccctgtgcgcctgcattctgcgagctcgaacagcggggccgatcggaggggaggtccaaaccgtaagttgaggaggtccctgaaccgtccccaggttggcgtgccctcgtcctcctggagttggatgtaccacagctgcgcgacgtcctccaggttgtatgaggccatccaaacgcgctcctcccccatggtgcgctgctggcggaaatacgactcacacttgttgaggaagagcataggatcggacttgccgtcgtagcgtgggaagtccagcttctgaaatttaggtgggcgatccagatcgcgcggcatctctgcgtgtcccccggcgccgtaatccgacgttgacgccgacttttccttcatggcggccatgtcagcctccatggtggacatcttggtggtgatggccctaagcatctccatcacgtcctgcatggacggctcggccatggtggctggttgcagggccgagttggtggaagattggggtgaaggtggagggctggtgtgggttgcagcggttgtggatgaaggattggagcgagtgggagaggatcgccgggatcgcgataccaagttgtcaagggcgtcgagcccctgggtggccggaccgcggctacgcagttcgtagccgtcggccgtcttctccggtgagattattcccctcaaccgtaggcttaacagagagggagagatttgggatataattcctgcttgctttattaaaagaaccgcctgctttatatatagccaggccagccaaaccaactcctatttcttctctatacttatcttcctaaacaacttcttaacaacttatccctatttgctagcagcggccagctctgatctgttgctggccgtgagcttatcttctaaacaaccctccaattttctagctactagcaactgcagctattcctgcgccctgatatgctgctggccgatatcttatccaatggaacctgcggctgttgcctcttgggcgtgttcagcgcgctcacgcgcacgccgtatgtcacgggtacgccgttgcctgacgtaggggcggccgtacatgacacaccctcactccagataattatagtttctcctgattgtctcttcctgatttaggatacaccaaaaggcttgttgaggaaaattctacgcacgatagaacaaatcaaaagcttaaatatcagccaaacacgtgagttaggggcagatgatcttcaggtagctgtaggagattacatggatatgggaggaccagcagaggtacccatccttaatctgtaaaacaagtagaaaccatgttattgatcataactgcagcaacataatgtgttacgtcttatgtctttcgaaggttttccagcatgtcacctttacaagacagcctgcaccaaaacagtggcataaaaagatgaaggccctcttccttagtaagagttcaagctactcatgccgtgcagtgatcactggtgatccatacattggccttgatgtagtaggggtgcctgatgaagtagctagaagaatgacagtacaagaatgtgtcacaaactacaacattgctcggctgcaagacatgatggagaaaggactatgcctaacatacactgatctcaataccaacacatatgacttggatggaaagaaaggaaacaagaagtgcatcatgccgagggttggtgaaactgtagagcgaagagtccttgacggggatctcgtcttcctgaatagaccaccaagcactgacatgcactcagttcaagccttatatgtccatgtccatgatgaccacaccataaagatcaaccctctcatctgtggcccacttggagcagattttgatggcgattgtgttcacatcttttccccaagatcagttccaggaagggttgaagctgcagagctcttcactgtggagaaacaactgttaaactcccacaatgcgaagctgaactttcagatcaagaatgattacctactagctctgaagataatgtgtgtcaggtcgtattctagagaaaaggcaagccaaattgccatgttctcgtcagggatgattctaccgggtgattggactattcctcagattctacagactaccgatgcattaagaaccctaccaagccacccaaacaaacaatctgttggagcctcagttactgccatcatctcatcaactctttcagaaaaaggtccaaggggggccataaagctcataaatcttctgcagcccctcctaatggaatcactgcttatggatggtttcagcataagcttgaaaggtcttgatggccggtgtgcaatgcagaaggcaaatcaaagtagttcgcttgagaccgataagttcaacaagttaactgtggactccattgttaattcctctgcccttggtctgctggttgacccaaaaaaagattcaactctgaagaaattagttgaacagattggtttcttgggacaacaactgcaaaggactggtaggttatactctagcaacttagtggaggactgctacaactttctggaaaggtgcagcggaagcaccaaatgttatgatccttcaaaaggacatgattttgttacgagttcattttacaatggtttaaatccatatgaggaattactccactcaatatcagtaagggaaaagatagagcgctcatcatctaaaggactggctgaatctggcaatctttttaagaacatgatggcaatgctccgagatgtcacagtatgctatgacggaaccatgagaacttcgtgcagcaactcaattgtacaatttgactcgacaaatgtatcaagttctgtgacaccaggtgatccagttggtatcttggcagccactgcatttgtaaatgctgcatacaaggcagtgttagatccagtttttggacattccgtcgagcacccgccgggcgcacaaaatcctcgcatgattgcctcgcgtaggcaaggtcgtgagccacacagtcgaaatagcggagcagcaaggcaacatcggcgaagcacgtgcactgcactgagttgtgccatcggcagacatgaatgtggcatccttgggcgcgctccagttgcgcttggggagcgcggcgccgcctagctcggcgatggccgccttcagctccggaaactccggccggagcgggtggccggcatcggggtcgaagacgtcttcgtcgctggagccgaagaagaagtcggagttgaccggaggtcatcgcggggaggaggaacgggagcagctcctcgtcagggaaaatttccctgcagccgaatatgtatag

SEQ ID NO: 689 - DNA, 3165 bp, Zea mays
  source 1..3165: mol_type = genomic DNA
ccaactttgtgctcttattgcagggtacacaccagcattcttcttttttgttctggcttgaagtaagagtaaatagataccttggactagttactggtatatgtagggatatggaagtaaatgcccacgctaaaataaagtatatcagtgtttcaaattgaaccactttcctctgtggtctgaatgattgacgagttgttatttaagaggctgaagacataacaggatatactgattcagtgccttagggaggtactatttcacactgaaatttattcaaatgcagctaatctggttatatatccttcataagtaacttcagtatagttgacaaatatagcatacacattgaagtcagtcatatgtccttgttgattagtggatggctttcatacagtaatcttgcttgctgctggtctggtgccagtgcttacactaaacctgtgttggctggatgagtgtccactaatgtttcctgaccatcccagaacttgttgtttataggatattccagccctgtctttgaaggaaatcaagacaacagatggtgcaattcgtttagagttgagagcacctcataataaacacatgacagaacgttcatggaactttcttgataaatatggatttcatcatggtggatgttctcaccataggacactgcttccagaagaggtgatattcttatgagtcatgagttatgctttcacgagatttattttggtagcttttatgaattccaggttgtttgaataacgcactgataattgatttatttcttgattatttgttaggctctaaatatattgaagaaggttcctgatgatactaggagaaagctagctgcacggggatacattgttcagactgggtatgtgatgaagtaccttccagtacctccgaactgtctatatattccagagttcaccgatgggcagagcattatgtcatatgtgagttttctagtacatgtatctggtagtttcttctatttgttgagtcctatctgatgtcctgatttaattgcttttcataccaggacatttcaatagctctgttgaagaaggttcttcagaaaatagaacagattaaaagatcaagatctggttccccaaactttgaatcacatgatgctgaatcatgtgatttgcagcttgcgattggccagtacatacgtctaaggggcactacaagggtatgtgaaaaaattagataatttaacctgtttacatggtgcatgagaaacagtcacagtttatttataaccactagaattacagaaatccctgcacctttgtgtgctttgatcggttttatagtgcacactggcatttatttctgatcatcctttttatttctagctgagttgtttttttgtattctctacgaccacgataacttttgtatcttattttgtagggccctcaagacaacaccaagcggtttactgttggcagtgctgattcagctgcattgtcaacaaaacagtggttagaaaagatgcggacactgtttatcagcaaagggtcaggtttttcatctcgcagcgttctgacaggagatccatatattgggctaggtgttgtagggcttccttctgaagttgcaaagagaatgacattcgaagagcaggtaactgacataaacattaacagattgcaagacgtggtagacaagggactctgtttgacctacagagatggtcaagctacatatgccatcactgttggatcaaaagggtacacaacacttaaagttggtcagactatcagtcggaggatagttgatggggatgttgtgtttcttaacaggccacccagcacacataagcattctctccaagctttctacgcatatgtgcatgatgaccatacagtcaaaatcaatcctctcatgtgtggccccttttctgctgactttgacggggattgcgtacacatatattatccacaatcgcttgctgcaaaagctgaagccttggagctttttagtgttgagaggcaactcattagttcgcacagtgggaaggttaatctccagctaggtaacgactccttggtagctatgaaggctatgtctcatacaaccatgttacacaaggaattagcaaaccagttggcaatgtttgtgccattttcacttcttgctcctgctgtaatcaagccagttccatcttggacaatatcacagatagtgcaaggtgcatttccagctaacctgacttgccaaggggacacacacttggttagggacagcacaatcataaggctggaccttggcaaagaatctgttcaggactcattccctgatttggtgtcctccatccttcgtgagaagggtccaaaagaagctctgcaatttctgaatgtgttggagccattgttgatggagtttttacttcttgacggtttgagtataagtctgcgggattttaatgttcccaaggctttattggaggaagcacaaaaggacattcgaaatcagtcccttattcttgagcagtctaggtgctctacaagtcaattcgtagaattccgagtcgaaaacaatttgaaaaatgtcaaacagcagatttcagattctgttgggaaattctctgaccttggtctgctgattgatccgaaaaaggaagcctcaatgtcaaaagtagttcaacaagttggttttgttggcttgcaactgtatcgtgaaggcaagttgtattcaagacgcttggtagaggactgcttcacaaactttgttaataaacacttggccattggagatgagtatcctccagaagcgtatggtcttgtccaaagttcatattttcatggtctcaatccttatgaagagttgatacatgctatatccactagagaagctatgatccgctcctctagaggtctgtcagaacctggaactttgttcaagaatttaatggccatcttgagggatgtagttatatgttatgatggaactgtgagaaacatttgtagcaattctatcattcaacttaagtatggggaagatgatgaaactgattcttcaagtgttgtacctcctggtgaacctgtgggtgtcttagccgccacagctatctcgaaccctgcatacaaggctgtcttggattcctcccaaagtaacaatgcttcatgggagtcaatgaaggtagtaatgttataa

SEQ ID NO: 690 - DNA, 10345 bp, Zea mays
  source 1..10345: mol_type = genomic DNA
cacccgggtgggttacgtggatagaggggtctgccgcgataggggtgcggccttagttggtcaagccacatgtgttgttatggccctgggcccatcttacgctgacacaaccttgcacgggatgaaagttggtcgaggtcttcgcgccttggagttcgtcgacgtagttcttgctagagtcgggtgggacgaacccaccctcgcaattgacgccatcagagaagatcttctctcggatggatccgcgatgcggtgcaagaccccttcttgatccgtaatgcaggagagggatctaaagcagaacacctcaccgacattgaaggtgaccggggtattgaagatgatagccatgcttttgaccaggacaacgtcgttgactgtgactcgatggtacgcgcaagagcacgtcgaatcacacgaaggtttatataggttcaggccgctagaatgcgtaacaccctattttttgtcgaggctatgtattggagtttcactggtgtatacagattataggcgaactgtgggtggtggaggatgagttctcctgctggtctaatggtgcgtggttgctatgaaaatgttaatgagctacgggatagtgttgggatgtgatgagataagatgctttcgtaggggtacccctcggccttatatagatgactagagagttattcttttacaggttgtcactatctaactctacccgaattcctttacgggttgtcaatatctaactctactggaatcctcttttaacgcaagatgcattcatgcttattcgaagttcggtcactttttcagtcgagttaacgccgagtgtttagctcttcagatgtgtgcaacctcttcgcgcgagacatcaacgttccggtctgcgcataacccagacatccggtctctatttccttgggtcaagctcgtccgatctaggcctggttgtgattcgagggtttgtcttgctagacatgccattgggagctcatgaagcgtttatgtgttcataagaacacagagaatatttatctcctacacaaccaaacacccccttaatatcactcaattcacatagagaaaggcgggatgaactgagcctacaacggctgtatgggcttatttacaccgcatattgaagcccaactcacgatgtttatttccacagagcagacccacaacagtacaacgggcactcatcaggcagcatatgtccgagtccgatacagtcaaccaatcgaacttgcctccgtgttgacccagcacactaggcggtacaccgctctcccacaccgtacgtccctcatccaacgttccacactcgctccataagcggttccgcatcgccgcacccagtccacatagggcaaccaaccttccccaccgactttacctgtaccaccatacaccggtctcacgcgcccacgctgtcttagccatccagcgcaggatagcacccgcggcgcacgctacgtctataaatagacccccaccccctctccatcgagttctttccccagaggcaccctcaatcccctttcccctcctccctccagactctcggaggcgggcgcgcggatctgtcggccggggccgatccagtcgattccaccggacaaggccgccaaaaacacactcgctcgacgcagcgagcggggccggcccttcgtgccgcggggcgcccggtggcgagggccgcagcgcgcagcgatctgaaaccctaggtggtggtgggcgccgccgccgtgtgtagacgcgatggatgcgaggttcccgtactcgccggccgaggtggccaaggtcgagttcgtgcagttcggcatcctcagccccgacgagatcgtaatacccctcgcctccctcccctcccctcgctgctactgtcattcgagcgggtcgagggttgagttgagtgagtggtcagccttagtgtagctggactagctgtttgctagtctaccagtaccaccccatttccagtgccaggagcccaggatcctagttcaggacatgttttggtgcaattcgtgcctgatttgagcttcattgccctatttcctgatttggtctagttgaaatcgagcaattctgaatctgtagtataagcgcacaaccgtacagaccttcatccctacaatctgagcttcatcatcaggggaaaaaaaccgaaatgtataggttttgcttcttgatgcctggaactatgcatataaactgctggaacagtattgtgcagagatgaaatgtatggttgagtttggaaccttagcagttctgctttgttcttgggtttcaagtaatatgatgaattaattcatgtactgttgtgaattgtgatcgacacagctcatgatagaccttgaattttgttgttgtttgccttattttttgggcacatgcatgttcttaagtgacgcgatctgtttcgtatagtattgttctgatctggctgagttcaacttcggctgaaacagctgtgtgttccatatgaacacagcagaaattccatggtagttagcaacaagatgacgttactaccgagtttctttaactgtataatttattctgccgaatagaaacgcttcattaaaacattattctggtttgtttgcacgtggcgtgcgaggaacaggtttctggggatagaaactaatgactgtttctttcttcctgcttttgtagagacaaatgtcggtgattcaaatagaacacgcagagaccatggagaggggcaaaccgaagcctggtgggctcagtgaccctcgattggggactatcgaccggaaaattaagtgcgagacatgcatggcagggatggcagagtgtccaggccactttgggcaccttgagcttgccaagccgatgttccacatcggattcattaagactgtgctctccatcatgcgttgtgtttgctttaactgctccaagatcctcgcggatgaggtacctatggctcagttattgattgatgtgtatatatcttgctatactggacggagttatcattttaaatagaggcatggtaaactgaaaatggagggattctcaccattcaatacatatgaaaaatacagttgcccgattttactctacctggtggtgttcattgttagcgcattttctcactagccattaacctctggaggtatcattctggcatgtaaactgtgattattgtacttttcttctttatcatcctatgacctagtatatcttcatggtttgttctgacttgtttgatgaaccttataaggttatattttgtatccattgcactattcctatagtaatcagggcgtaaccaaacactaagttttgagtctttttcatgagttcatgttcaagtgtttacacatttgaccacttcattagatgcttacaatgtttagcatttgtgttgcaaaaccaaattatatttacttgttaatcaccatttatctatttttgtcttgcaggatgaaaccaaatttaagcaggctttaaaaatccggaatccaaagaatagattgaagaggatatatgatgcttgcaagagcaaaaaagtctgtgcaggtggcgatgaccttgatgttcaggaacaggatactgatgagcctattaagaaaagaggtggctgtggtgctcagcagccaaatattacagtcgatggcatgaagatggttgctgagtttaaagctccaaagaagaaaactgatgatcaggatcaactccctgagccagtggaacgcaagcaaatcctctcagctgagagggtatttctataatctctaatcaattcagcaagttatgttatttcttgtaattggtttcttacatggcttgtttgaccaggtccttaatgttcttaagcgtataagtgatgaggactgtcttctgttgggcctgaatcccaaatatgcccgtcctgattggatgatacttcaagttcttcctgttcctccaccccctgttagaccatctgtcatgatggacacctcttccagaagtgaggtaagcctaataccaatatacttcctatgtcccaaaataaatatctttctagaaattttcagacagataagaacggtggcaaaaaaaaaaacaattatccccatctccttccctttcccgtaggacatctcctgactttgctagctatcatttgcatgcacctgtgattagcgtttgtattaggagtcaatgtcccatattattgtagaatgctattttttttgggacataattaaaacctcagaaagttacttattttggcacggagggagtagttattatgtgtctaattgttgctgcatggatggcgaagtgcaccctcattactcactgatgatattctattaataaatatgtttaagggctactacttcagtccatgtggtaaagaaggtatttatttcacagcttttcactgtgattcttcttggcctttgcgctgtttctacaggatgatctgactcatcagttagctatgataatacgacataatgagaatttgaggaggcaagagagaaatggtgctccagctcacattataacagagtttgctcagctgttgcaatttcatattgcaacatacttcgataatgatcttcctggccaacccagggtgagtggtttagaatgtcaatttgcatgtataaaatcaatagataccaggacaatatttaaggatcctttttttttgttgaaatgctcaggccacacaacgttctggaaggcctattaaatcaatttgcagcaggctgaaagctaaagaaggcaggattagaggaaacttgatgggcaagcgtgttgatttctcggcccgtacagttatcacaccagatccgaacataaacattgatgaattgggagtaccatggagtattgctttgaacctgacatatcctgaaactgtcactccatataatattgagaggtgaaccagtttgttcttattgacaaatgttatttaattagtgtgcttttgctgatcatttgcagctaattccaatgatttcaggttgaaggaacttgttgaatatgggcctcaccctcctccaggaaagaccggtgcaaaatatattatcagggaagatggtcagaggcttgatcttcggtatgtgaagaaaagcagtgatcagcatctggagcttggttacaaggtaaatatcaactttcactatgattatagctgctgctgactatagaagttgctgcttttgtaaagtttatgttttgactcattttggattctcccaggtggagaggcatctcaatgatggggattttgttcttttcaatcggcaaccaagtcttcataaaatgtctatcatggggcatcgcatcaaaattatgccctactcaactttccggttgaacttgtctgtcacttcaccatacaatgctgacttcgacggtgatgagatgaatatgcatgtcccccagtcatttgagaccagagcagaagttctggagttaatgatggtgccaaaatgcattgtctctccacaatcaaataggcctgtaatgggtattgtccaagacacactgcttgggtgtcgcaaaattactaaaagggacactctaattgaaaaggttgataaagagaaattccacccgtcctttctgattatatgatgttcagttttgtgactcatttcaatttcattccaggatgtatttatgaacatcttgatgtggtggcaagatttcgatggaaagattcctgcacctaccattttgaaacctaggcctatttggactgggaaacaagtttttaacttaattatccccaagcaaataaatttaattcggttttcagcatggcattcggaagaagaaaaaggatttattactcccggtgatactatggtcaggatagagaagggagagcttctgtctggcacactttgcaaaaagagtcttggaacaggctccggaagtcttatccatgtcatttggtaatgatgcctcatctgaattttactttttgaaagttgcatgacaatgataaatattgccgtttccattttctaagcaaatcccgttttaatttgttcttttcagggaagaggttggtccagatgctgcccggaagttcttaggacacacacagtggcttgtaaactactggcttcttcaaaatggtttcagtattggaattggggatactattgcagatgcatccaccatggaaacaattaatgatacaatatctaaagctaagaatgctgtgaaggagcttattaaaaaagctcatgagaagcagttggaagctgagccaggacgcactatgatggaatcatttgaaaacagagtgaaccaggtactgattgctctgtttttctttgtttatatcattcggaggagtattcactattcagtgtttaggttgagttgttttaacttcaataggatccctttctgtgtaggttcttaacaaagcccgtgatgatgctggtagcagtgctcagaatagcttgtctgaaagcaacaatttgaaggctatggtcactgcaggttcaaaaggcagtttcattaacatttcacaaatgactgcttgtgtgggacagcagaatgttgagggcaagcggatcccttttggtttcattgatcggacgttgccacatttcacaaaagatgactatggtcctgaaagtcgtggatttgtggaaaattcttacctccgaggtctgacaccgcaagaatttttctttcacgctatgggtggtagggaaggtcttatagacactgctgtgaaaacctctgagactgggtatatccagaggagacttgtgaaagctatggaggacatcatggttaaatatgatggtactgtaagaaattctcttggagatgtcatccagttcttgtatggagaagatggcatggatgctgtttggattgaatctcaaaaattggactcattgaagatgaagaagcctgagttcgataatgtattccgttatgagctggatgatgagaattggagacctaactacatgctacctgaacatgttgacgatttgaagaccatacgtgaattcagaaatgtgttcgaggcagaggttcaaaagctagaagctgatcggtaccagcttgggtctgagatcaccacaactggtgacaattcgtggcctatgcctgtgaacctcaagcgactcatctggaatgctcagaagacattcaagattgattttagaagaccttctgacatgcacccgatggaaattgtggaagcgatagataaactgcaagaaagacttaaggttgtacctggtgatgatgctatgagcattgaggcccagaagaatgcaaccttgttctttaatatcctacttcgtagcacgtttgctagcaagagggtcttgaaggaatacaggcttacaaaggaagcttttgaatgggttattggtgagattgaatcgaggtttcttcagtctttggtggcccctggcgagatgattggatgtgtggctgcacaatctattggagaaccagcaactcagatgaccctgaataccttccattatgctggtgtcagtgccaagaatgtcacccttggagttcccaggttgagggagatcattaatgttgccaagaagataaagacaccatctttgtctgtttacctgaagcctcaggtgaaccagaagaaagaattggctaagaatgtccagtgtgctttggagtacactacactgcgtagtgttacccacgccacagagatatggtatgatcctgatcctctagggaccatcattgaagaggacacagagtttgttcagtcctattatgaaatgcctgatgaggacattgacccggataaaatttctccttggttgctgcgtattgagcttaaccgtgagatgatggttgataagaagttgagcatggctgatattgccgagaagattaaccgtgagtttgatgatgatttatcatgcattttcaatgatgataatgcggataagcttatcctccgtatccgcatcacaaatgatgaagctccaaaaggagaaatacaagatgagtctgctgaggatgatgtcttcctaaaaaagatagagggcaatatgttgacagagatggcgcttcgaggcattccagatatcaacaaagtgttcatcaaagaagggaaggtcaataccttctatcaagatgacggtttcaaagcagctaatgaatggatgcttgatacagaaggtgtgaatcttttagctgtcatgtgtcacgaggatgttgatgctacaaggacaacaagtaaccatctgattgaagtgattgaggtacttggaattgaggctgtccgtcgatctctcttggatgagcttcgggtggtgatatctttcgatgggtcatatgtgaactaccggcatctggccattctttgtgatacaatgacatacagaggtcacttgatggctattacaaggcatggtatcaaccgcaacgacactggacctcttatgagatgttcctttgaagagactgttgacatcttacttgatgctgctgtatatgctgaatctgaccacctgagaggtgttactgaaaacataatgcttggtcagcttgctcctattggtactggaggctgtgcactatatctgaatgaccagatgttgcagcaagcaattgaacttcaactcccaagctatgtcgaaggcctagactttggcatgactccagcacgatcacccatcactgggacaccttaccatgaaggaatgatgtcgccaagttatctgctgagtccaaacatcagggcttcgcctattaatacagatgcttcgttctcgccgtatgttgggcacatggcattctcaccattcccttcaccaggtggttactccccatcgtcagggggatacagcccatcttctccggttttcaccccagagaaaggatatagccctctctctccatcatatagccctgcatcaccaagctatagtcccacctcaccgtcttacactcctggctctcccacctacagtccaacaagcccgaattactccccaaccagcccgacgtactcgcctaccagcccatcgtactcacccacatctccgagctacagcccaacatcaccaagctacagccctacatcaccaagctacagccctacatctcctagctatagtcctacatcaccaagctacagccccacctcaccagtttatagcccaacctcaccagcatacagccccacatcacccgcttacagccccacatcgccatcctacagtccaacttcaccatcttatagccctacatcaccttcatacagccctacgtccccttcatacagccctacctccccctcatacagccctacctctccctcctacagcccgacatcacctgcttacagcccgacatcaccaggatacagcccaacgtcaccgagctacagccctacatctccgagctacagtcctacatctccgagctacaatccttcatcagccaagtacagcccttcacatgcatactctccaagcagccccaggatgagtccatacagccagacttctccaagctacaggtgcgcacaattctgtgttgtcaaagggtactctgtccatacatatctgtattgactgttactgtttctgtttgcgcagtccaacgtcaccgacttactctcctacatcaccatcatattcacaaccaagtccatcgtacagcccaacgaggtgagtgccatccagatcttcatatcttgtggtgcgtctccaattatcatgcctaccgccgtctgttttacacatttacccaatcaatgcagcccgttcaacacctctggaggacccagcccagactacagcccgacctctccaaattacaggcaagtcattctactgccagccaaatgtatacctgtcgtggaggacatggtttcgtgttctgacaaaccttattttgcacaacgcagccctagcggaagctactcccccactgcaccgggctactccccgtcgtccacaggccagggtaatgacaaggatgataagagcgctcgttgaagaggcacaggagaacaaggcgctctagagcactcgatgaaggcactcggtgatggccacatgggaagatcgaggcacttttttttcccttgagtttttgtatggttgatgaactctgagagcaaacttgtatttttccgagctgctaatagcagaaatagttgtttatgtatgatactagaactaaggactggactgtgctgcgacttgataagtggttaaccgcgtggtcgcccctcagagagtaacacatgtagtaatgtttaatgataatatcgtgactgtacttggtactactatgctatggtgtactagtgtattgcatgcgcgcgtggagcaga

SEQ ID NO: 691 - DNA, 12937 bp, Zea mays
  source 1..12937: mol_type = genomic DNA
cagtttataaaaaaatttaaataaatcgatccgagttgagtcaagctgaccacaaaccgaaccgagtacaaaacacgagcatttcatctagcctaacgagggcttcccgttttgccgtttgatcgtttcccttttcttgtcgccgttggttatcgaaacctgtgatgaaccgtaatcgcgcacagaagatcacatcacacgctgttcttgctttccttgatccccgcgaagaggctcgttccgccgttggatgtcttgcagcgcaccacggacggccgatatgcctcggcggacaggtcgccctcctccctgagaccgggacccgcacagcactttctgaccgctggcccgcctgtcagaaccgccgggcatcgtcgacgccgccgcttgcccccattaaacccccggtctcgaggcgattctcccgcagcgctacatcgccactagaaccctccccactctacgaagcacgaagttaacgcgcgacggcggtcacaccgccgccgccgcccaccaccgctcacggccggcggcgacgcgctgcatctccgcaccgcctcctgtccgccaaccccgccctcccatccccgtacgcgtccggcctgccgcagcttccccttcacccgccaggttcggatccaccccccgccgctcgtcctccgtctattagagggggctggacgggttgggtgtacaactcacacgtcctctgtacgcggataggggactcattttctggcaagcatatgcaaggattctgctgctctttaggctagattccatttttgttatgttgggacttttttgttcatcggggtgggttttaatacggtgcatctgttggtggttctatcctgttattctgcagtgggcaacactggcgttcgttggcatctgacatacgagagcttaccaaggacgaacacagtttattttccatgattttttaggacgaaatgctgtttaatttcgatgggttttttagggttcagctgaatccatgtgccccgtgtgtcagtttcatccctgggtgttttatcgatgttccgttagtcggtactgactcagtgtgaaaataaaactattcagcagtatagatggggttcctctgttgtgtcttgctttgtgctgacgttttatgtgtggcatttgtccagtttcttcagtttgtcaccaattgaatgaattgatgatgagccagggtgttgataaatgataagtgataggtcgatgtttgcttatgattgttttctgctttgatttctcttctatgtgctatcacttgctccttgttttttattcaactcgtgtatactctgagctgtataaatgatttggtaagatgcttcgtgcatgctaattccccttgtgcctcacgggtattttttcatagatcattaatgccttagtggttctggtttcatgttcttaacgggccactctgtatggtattatttctgttgaaacgtttagtttctgattgaccaatttggtgattttgtgatacttgataggctataagctgctagtgcttgtggaatggaagagccacagaaggacagtgggcaaccatcaaaaagttctgattctgagctagaagctatggtattggatgataatggagcgggaaaatcccatagtatggaggaaaacagggattctcctatagatgtcgatggtgggcagtcatctatggatgtggatatcaagggaaaatcatccctcagtgatgatgttaatggaaagtcttcttccgagccatattccaatgctccaattgacatgagtgtcgaaagcctagagaagttttgcaaagaagcgtcaaggtccttctttgatgaagttggtctgattagccatcagataaattcctacaatgagtttgtctcgcatgggctccaggagctttttgattcgcttggggaagtgattgttgaacctggctatgatccttcgaagaaaggatcaggtggctggaagcatgccatcatcaagtttgggagagtgaagcttgaaaagcctgtgttttggactggcaaggatgaaggttctgttgattttaaaccttggcatgctcgtctccagaatatgacatatgcttcaagacttatagtagaagtgactattcaggtcctgagtaatttcattcttttacatgttctttatgtatgccatggttttcccaagaaaaatatgccacctgggtgaaattgatatcagtgatgagggaaaaaagttacagaaatgcttgattatgaatggcatgaacccatgttagacaatacaaaattcagttcttttcttataagctatccgcctaatcccataaaccaataccttggctactgagcaatattgaccagcctgcatttcattttcatgaatttccctggtaccctaatcaatatagcatggttctaaatgatttagtattaaataaagtagcgcagcttaggactggagagtgattggtgttttgaggacatcccatcagtcatcagcactatagttattcttgttttctccatgtactggattccatttgaagagtattacatttacttattccttaagttttatgtatgatgaagctggagacatgaaatcgctctgctatacttgttgtggcgtcataattttactcacatttgcttaggttttatcatcactgattatatgtgggttatttttcattgtaccaggtttattctttggagaaaagtgacaaatctaaaacagggaatgatggttttgttcaaaaaaggaacttcatgaatgaaactcattggatatttattggcctccttccggttatggtcaaatcaaacttatgtttgctgcatagcctcaacgaaagtgagtgcctgttcgacgcaggtggatactttttggtcaagggaatggagaaggtataactctgtgaaatgttttcaaatcatctaatcgatcctagttgccatgacaccaataatgcgattagtcatcgataaaccccttttttagagttcgagggcagggtcgccttggcctttcgtattcataaaagacaagaaacatcctcttacagctctgagttaaaagctcaccaagcaaaatgagaaaggaaaaggagcagcaaagctgagtcccagaatatgagaaaaggcaccagaacgaacaccagccactactcaactaggaaaatcttagactactcattgcaccatctccatagcagcattaaacgaccatcaccactgccctgaagacgacatttcatccacttttatgttctcaggtggagtatcactctattcaaggtcatttataagcccaattaattgagcctagtcgaccctagtcatccatatagtcatcctgtatgtaccaggaccaatatatatatatatatatatatatatatatatatatatatactatataatatgcagtataaaggctatgtaaagcaagatttaagacaaaatagcaaagagcagagcattgaaggctgggggaagcttaccaagtatggagaaggtacaccactcgttggtgggggagctcatcatcgaaatcccgagagcaggacttgtgggcggtgcttgaaggctaggcacatcctgccgccgcttgactgaggcaggttggtgccttcccctgtgcggctgctcaagcttgtgctctttggccaccaaatacagggaagggacgtgttggcttcgacctctccacaagaagccctttcgaatcttgtcaatagctttcaaagcccattgaggaaggtcaatggccatggccaaataaacaatcattcctgtaagaacagactgcaccataactcttctaccagccttgttcattaaatctgccttccaccccggaagctgagctgctaccctatcaatgatagattggatggccgatctcggaagcttcttcaaggaggcactccgagatatttacaagggaagcttgatatctcacaaggcaacatctcctgtaaggtctcaacctcagattgaccacactaaataggaaagacactactcttctgaacattattttgaagtcaagaagcatctccaatcagctgcaaaatatccaagaccatatggatgtcctgggataaaggacgaagaaacagggcaacatcatcgacatagatagtggtccgatggttaagaaatatagatgtagggattgaagcagccattcagctcctgctgccatcaccaagtgacctagaacatccattacaagaataaataacataggagataaggggtctccttgcctaaggcctatcctgtagaaaatagtgttccctggtgacccatttaacacaatccacatagatgattaagagaggagaccactgatgatatccctccgaatctgtccaaaaccaaggtgcctcagaacttccaatagaaatggccaagagaccgaatcaaaagctttagaaatgtcaagcttgaacaaaagactagcagactttcgcttatgtagacagcgagcagtttgttgcgctaacatgaagttatcctagataaaacgccccttaataaaggcactctggttgagggagcccaattcatgtaatcgactagcaagacaatttgccaacagcttagtaaaatttttagcaaaactatgcaccaaactgataggtctaaaatcttttacaagatcagccccttccattttaggcacaagagtgataaaggctgagttgagcttatggaagttacagaactttctacaccagactgctggtgccatatgcaggcttgttgtgtttaagctatatatataggtctaaatgtgctgcagtgtcttattttgtcatatcttggagattctaatagattttcaaagtttaagtgataattattacaggaacaatgaagatctgctgatgatggtactccctgattatttgctaagttcatttggagtttccttttgggggtgtgactgtctgagttgtagcctttttactgcaaagataacatcctttaaatcatgtacattatttttcctttcatcttactatgtttctattattgttatacctgcaggtattcattgctcaagagcaaagatgtctaaggaggctttggattagtgaccgaccttgctggactatctcttttatgtctgaaatcaagcgtagacgtatatatattaaactagttgaatctacaaggagtgaagatttcagtgagagcaaaatcattaccatttcctttttgtatgcgacaatgccagtttggttgttgttctttgcacttggaatatcatcagataaggaagtgtttgatatgatagatatgcaagattgtgatgcttctgttatcaacacgatatctgcaactatcaaagaatctgataaactgtgtgaagacttccgtaaatcagataaagctcgtcaatatgttgatgagttggtaaaaagttcgagatttcctccagcggagtcctttgatgactatattgctaggtttctctttcctgatattagtggaaatagaaacaaagcacttttcttagggtacatggttaaatgtctgctaatggcttttactgggaagcgtaaatgtgataataaggatgatttcaggaacaaaaggctggacctacctggtgaattgcttggaagggaacttagggcacagcttaggctggcagagaaacgcatggttaaggccatccaaagagatttgaatagtgaccgtgagttacaagatcttgaacgttatatagatgcatcaattgttactaatggtctaaatcgtgccttttccactggttcttggtgccatccgtacaaaagagctgaacgatgctcaggaattgttgcgactctaaggagaactaatcctcttcaaatgatgtctgacttgaggaaaacccggcagcgggttgcttacgctgggaaagctggtgatgcaagatatccgtaagtaacttatttttcatcaaccaagtattgcatgtgcatcttgtgcttttgtatctcctaacgttgagtgacttaagactaaatccctacgtacaggaatccatcctattggggaaagctatgctttatgtccactccggatggtgaaaactgtggacttgtaaaaaatctagctgttactgctattgttagctcaagggtgatgcagcccttgattgagagcttcatttcttgtggaatgagtaagctgaatgacattcctactgaacacattcaaagaatggataagatctttttgaatggcaattgggtgggatcttgtgaaaattcagcttcatttgtatttcgattgaggtgcatgagacgcagcagtctgattgatcctcaggtgacctcttttttccatggctggtcactttctgctttaacttatttacagtctttactaagatgtttggtgtgcaggttcagtatatgtacactgtttttgttttagaagagtccctatttcttgtcattgattaaaaaaaaaatcaaattttatcttttgtatacattgatcaatatgacttgcttataaagcctgcttgaataataaaacttgacttgtgggggtaagacaaccctcgggtattgtattaagaagactttctcatatatgtcaagaaaatccctgaacccttcctcgaacacctgtcccacccatacacaatggcaccgtaggccatgtgagaatggccgcgacagcagctgggtcttagacctgtgctcgagggactggaggagtgttacttagaccacctaatcaactcagacagaggtccttttgcaagtctgcttgaataataatggttttcgttggctcctttgcaatgttgatcatctattacctatttttttaggataaatatttttttgtaatttggttaacaagtgagttaaaattttaaataggttaaaatcatttcctatgaagttaccaggatgttgtattagtttgtttggctcttttgcaattgtaaaggatatataccaggggtaccctaagtatattaataataaagatgttggcttgtgggcccaactcggactcggactcaggagaacccggtccacatgtcaagatgaagtctgcatggtcgaataaggcaagggagattgtaggatttgtgtcgtacctgagtcgtatcatcattgtaacagaaatacccgatttataagggaagtatccgtagcgattaggatatgttatgatcgccatcccgtgaacagccctattaaaattagttggttagataaacattcggttagttagtctcggataaagtttgttagggcttgttatcttaatcggttggattagatagactttgttagggtctgttatcttattcggattggattagtcttagatagagtttgttagttgttggtggctgctatctcagcctatatattgtacccctttggttaaggaagaaaccaagcaggcaagtaccttgtcgtgcttcccccacctcgtctactgtttggccatggtactgttcattgtctactgttcgtccgcgagtactgttcgcgcgtgaacagtatcacactttccccaaccagcagccctagccctaggacgacgtcacccaagcgctggggtcctggtcctcgaacctcccacccaccactcgtactacctccgtaaccctagttccaacatgatagggaattagggatacctgtaactgaaatagatcaggacttgaatgtccgagtccttgtctggtatggccacatgtttcttttccttgtaaccagaaaacagaagggcaatgcgccccagaagggcagaaaaacagaaaacagaagatcatgagaataaccaccataatactagatgtagggtattatctcatgacgagagcccggacctctgaatcttgtgtcctttgtgtctttactttcaattctttgatctcgcgaacaccatacaaattcaccgttgcaaaatccttgacagcaatcttgatgctttgttcccattttttgaggataattattttgttttcgtaatttggttaacaaatcagtataaataggtcaaaaccattttctttgaagtgaccaagttgttatattagtttgtttattattaatttctcaaattgtgctctgtctttcttttctgattcagttaactgctgaaaatttcctgcctatctcgactgttgtgtttgagtcatgtaattttaggttacttccttttctcaatgctttaatctcaggatgttggttgcttttagttgttgacaccttctcagtgctgcatactaatattccacaccaagatgttctttataatgttttatatgtttcttgtttcatcttgttaggttgaaattaaaagggacaagcaccacaatgaggttcgcgtgtttactgatgcagggcgaatcctcagaccccttcttgtggttgagaatctgaataaaatcagaaaacctaaggggcgctcattctctttccatgaattaatgcaacaagaaataattgagttcattggtgttgaagaggaggaagatatacaatgtgcgtggggaatcaggcatttgtttgagagtgaaggtgcgatatctagttatactcactgtgaactggatccttcctttcttctgggattaagctgtggtatcattccttttgcaaaccacaattttgctcggagggtattgtaccaatctgaaaaacactcgcaacaagctattgggtactcaacgacaaatccacacatcagagttgatactctttctcatcaactatattatcctcagaggcctcttttcaaaacagttatagccgactgtcttggcagatcagattatgcttcttttggaagaaaaaatgatttcgcgagaccagaatattttaatggacaaaatgcaattgtagcagtcaatgttcatcaggggtttaaccaagaggattccctggttatgaatagggcttctcttgaacgaggtatgtttaggactgaacacctcaggagctataaggcagatgtagaaaacaaggatggaaccaaacgactgaaattgaaggaaaaaatagactttggaaaaacagaaagcaaaagaggacgtgttgacaatcttgatgatgatggcttaccttacgttggtgcaagtcttcagaccaatgacattgttattggcaaagtctcagaatctggagaagaccacagtattaagctgaagcatacagaaaagggaatggttcagaaagtattgctttcagcaaatgatgaagggaagaattttgctgtggttactctaagacaggtaagaccttttctggctgcatctcactcacatgtcttgagatagattgggatgggaaattagttatttttccaccgcaccccaatctctcaacacatttgaatgaggtggatacgaatgcagccaaaagacctaaatgacatttgtcttagcaaagaattgaccattaatcaatagtacattccttgaattctcacttcactagcgcgcatacggatcttatttgacaatagaatgcagcattctgtaactgcattgattgtcagttaagcttgttacctgttttgtgtgtcaggtgttgttatttaacccagtagttatcttgctcttgagtgattattgttggccttcttgacattcctttttaactcaaaatattaatgaattatctatgcccatattcttgccatgcaattaagatgagatcatgaatgataagaaagacaagcatcaatgtgcgctcatgggttatgggtatttcatcctttctggttaaaataaaacttggtttgacttttattacctctcttttcttttacaacagttgtcactgttaacttttagggtgtaacttcgagacacacacaaatatttctaagtacatatattcgttgggtaccattgctggcagttctaacagtggtaatttcacactattgaaccatatatctagaaaaaaagtataaataattagaaaatcaaagctgacaagtattgtgaaacaggggtagtacatttttatggggttcagcactttaacatgattccatcgatccaccccacgtccccataccccaaaaaagtaatataggaatttggcttcttgttcttgacttttagaaaatgaatgagcccatatagggtgctggcttggttgggccagcagctcaactcaccctttttcatttccttagattagattccttcaacacttgtaacgtgacttctaattttctttgcgtccccaccttcacatttacaccacacgttactttttattgaccatttaaagttctctttgttgatctgatttaggttcggacaccttgccttggagataagttttccagcatgcatggccaaaaaggtgttgttggttttctagaatctcaagagaacttcccatttactcacgaaggtatagtcccggatattgtgataaatccacatgccttcccaacacgtcaaactcccggacagctgcttgaagctgctctggggaagggaatagcttgcaaaggtacaatgagatatgcaacaccattcaccacagcatcagttgacgttattgcagaacagttgcacaggtaagtgtttcttctaacggatgaatagctgcttgccttaattcagtaacccaccccttgcacatgaaacgaagatctgagaccctttcaaagggttgggcattttttagcctcttctaggtgaactttgtaattgttaagcttattaatacatcttataagaaccttggacgtcattaatgcaccctatgctctcaagtcttaactctgttagtactttactgcttattacacatacagaagaagaaaagggaaaggtagggaaacaatgtacacagagagagagaacagaatggctggtggccatcctcatattttgtatatgagtaaacatgtatcagtaatttcacatgtatctttttgtcatattttgcaccaaaatggtggaaacacacgagtttccttcccgtttcccttttacttgtattactatcagttgctgcttatctaacggagacatccatattggtaccgctaaatataaaactgagtgcactcacacactactatgttctcagtgaggatcttacttcagataatcaagtgatgtatctgattttttttgtgtgtgtttagacttgttttcgtctgtgacttgtttagttaattttcaagattttatgtatcttgttgcattgcagggctggttattcacgatggggatctgagaacgttctaaatgggcgaacaggtgaaagagtgcaatccttggttttcatgggccctaccttttaccagaggctgattcatatgtccgaagataaggtgaaattccgtaacactgggccggtgcaccccctcacgaggcagcctgttgccgacaggaaaaggtttggtggagttaagtttggagaaatggagcgtgactgcctcctcgcccatgggtcagctgccaacctgcatgaacgcctcttcctgcttagtgacttctcccagatgcacatctgccagacatgcgagcgcgtggctaatgttgtcatgaggtctgtccccggaggcaagaagatccgtggcccctactgcggcttctgcaagtcttcggagaacatagtgagaatcaatgtgccctatggcgcgaagctgctctaccaggaactcttcagcatggggatctgcctcaagtttgagacccaagtctgctagaacttgtagacctgcttgcatccagttattacatatgtacatacagctagcctatgaggatctccaagctggtgtgccggtgtgtgatgctggcatagtaaggatgggcgagctagaaaccctgttgtgtttatgtgctgttttctccctgctcatgtggtaaactatgctaaagtgaatgaacactcgtttcctgttccctctttgaatgcgctgtgttagcatgcccttttgtttgaagattgcgtcttttgtggagcaccttgtattgctccgtagggatcacaccccttaccgccggcgatggccgacgatttgagataagatataatatttctggtcgtccttgttaaagagttcatgcatatacagtacacaagaaatgtcgatcgaatatagctagtaaaacaacttcaagaaacatgtacatgcggttggatggatcctttctcatcgatgatttgtctgcattgattcatccaaatcaagatacaagaggcagcatgagatgatctgtctgtgtctgcattgatccaaatcaagacacaatagagggacagcatgaggacgaacagagacaaatccatcgccccgtgcttgagtttctccacgagctagtaagagatcagcaagatcctctctagctaactacctgagggaaacgaacagcaggggaggaccaagaagtgatgagtgggggaactccatgcgagccctctggcctctcctcccacaggctacatcttgaggacgaagaagaacagtcctcgatgcgtcttcacctagctgctgcttaatttacgagtgatgctcttcgatccaaaggtacttatactacaaatacccctccccctctctctctctgtctccatcgccccaatgcaaagccggtctttctatagctcatagctgctggaatttggacctggctttgaaacatgtcgtgcactcgcgttgggtttgaaagagatgacttgcgttgcagcgagcgagcgacacaggtcaggtcacactgcaggggggaagcgaagcacgagtgtacatgcattgaacctggacgccctctttagcttttgcgtttgggcatacagtatttttattttggccttctgggatttgggaatacgagtcatcgattccctcagtgtcgtcccgtcacagctttttttttccgttgcctttatgctgcatgcccattcagcagtcacgca

SEQ ID NO: 692 - DNA, 11486 bp, Zea mays
  source 1..11486: mol_type = genomic DNA
cagtttataaaaaaatttaaataaatcgatccgagttgagtcaagctgaccacaaaccgaaccgagtacaaaacacgagcatttcatctagcctaacgagggcttcccgttttgccgtttgatcgtttcccttttcttgtcgccgttggttatcgaaacctgtgatgaaccgtaatcgcgcacagaagatcacatcacacgctgttcttgctttccttgatccccgcgaagaggctcgttccgccgttggatgtcttgcagcgcaccacggacggccgatatgcctcggcggacaggtcgccctcctccctgagaccgggacccgcacagcactttctgaccgctggcccgcctgtcagaaccgccgggcatcgtcgacgccgccgcttgcccccattaaacccccggtctcgaggcgattctcccgcagcgctacatcgccactagaaccctccccactctacgaagcacgaagttaacgcgcgacggcggtcacaccgccgccgccgcccaccaccgctcacggccggcggcgacgcgctgcatctccgcaccgcctcctgtccgccaaccccgccctcccatccccgtacgcgtccggcctgccgcagcttccccttcacccgccaggttcggatccaccccccgccgctcgtcctccgtctattagagggggctggacgggttgggtgtacaactcacacgtcctctgtacgcggataggggactcattttctggcaagcatatgcaaggattctgctgctctttaggctagattccatttttgttatgttgggacttttttgttcatcggggtgggttttaatacggtgcatctgttggtggttctatcctgttattctgcagtgggcaacactggcgttcgttggcatctgacatacgagagcttaccaaggacgaacacagtttattttccatgattttttaggacgaaatgctgtttaatttcgatgggttttttagggttcagctgaatccatgtgccccgtgtgtcagtttcatccctgggtgttttatcgatgttccgttagtcggtactgactcagtgtgaaaataaaactattcagcagtatagatggggttcctctgttgtgtcttgctttgtgctgacgttttatgtgtggcatttgtccagtttcttcagtttgtcaccaattgaatgaattgatgatgagccagggtgttgataaatgataagtgataggtcgatgtttgcttatgattgttttctgctttgatttctcttctatgtgctatcacttgctccttgttttttattcaactcgtgtatactctgagctgtataaatgatttggtaagatgcttcgtgcatgctaattccccttgtgcctcacgggtattttttcatagatcattaatgccttagtggttctggtttcatgttcttaacgggccactctgtatggtattatttctgttgaaacgtttagtttctgattgaccaatttggtgattttgtgatacttgataggctataagctgctagtgcttgtggaatggaagagccacagaaggacagtgggcaaccatcaaaaagttctgattctgagctagaagctatggtattggatgataatggagcgggaaaatcccatagtatggaggaaaacagggattctcctatagatgtcgatggtgggcagtcatctatggatgtggatatcaagggaaaatcatccctcagtgatgatgttaatggaaagtcttcttccgagccatattccaatgctccaattgacatgagtgtcgaaagcctagagaagttttgcaaagaagcgtcaaggtccttctttgatgaagttggtctgattagccatcagataaattcctacaatgagtttgtctcgcatgggctccaggagctttttgattcgcttggggaagtgattgttgaacctggctatgatccttcgaagaaaggatcaggtggctggaagcatgccatcatcaagtttgggagagtgaagcttgaaaagcctgtgttttggactggcaaggatgaaggttctgttgattttaaaccttggcatgctcgtctccagaatatgacatatgcttcaagacttatagtagaagtgactattcaggtcctgagtaatttcattcttttacatgttctttatgtatgccatggttttcccaagaaaaatatgccacctgggtgaaattgatatcagtgatgagggaaaaaagttacagaaatgcttgattatgaatggcatgaacccatgttagacaatacaaaattcagttcttttcttataagctatccgcctaatcccataaaccaataccttggctactgagcaatattgaccagcctgcatttcattttcatgaatttccctggtaccctaatcaatatagcatggttctaaatgatttagtattaaataaagtagcgcagcttaggactggagagtgattggtgttttgaggacatcccatcagtcatcagcactatagttattcttgttttctccatgtactggattccatttgaagagtattacatttacttattccttaagttttatgtatgatgaagctggagacatgaaatcgctctgctatacttgttgtggcgtcataattttactcacatttgcttaggttttatcatcactgattatatgtgggttatttttcattgtaccaggtttattctttggagaaaagtgacaaatctaaaacagggaatgatggttttgttcaaaaaaggaacttcatgaatgaaactcattggatatttattggcctccttccggttatggtcaaatcaaacttatgtttgctgcatagcctcaacgaaagtgagtgcctgttcgacgcaggtggatactttttggtcaagggaatggagaaggtataactctgtgaaatgttttcaaatcatctaatcgatcctagttgccatgacaccaataatgcgattagtcatcgataaaccccttttttagagttcgagggcagggtcgccttggcctttcgtattcataaaagacaagaaacatcctcttacagctctgagttaaaagctcaccaagcaaaatgagaaaggaaaaggagcagcaaagctgagtcccagaatatgagaaaaggcaccagaacgaacaccagccactactcaactaggaaaatcttagactactcattgcaccatctccatagcagcattaaacgaccatcaccactgccctgaagacgacatttcatccacttttatgttctcaggtggagtatcactctattcaaggtcatttataagcccaattaattgagcctagtcgaccctagtcatccatatagtcatcctgtatgtaccaggaccaatatatatatatatatatatatatatatatatatatatatactatataatatgcagtataaaggctatgtaaagcaagatttaagacaaaatagcaaagagcagagcattgaaggctgggggaagcttaccaagtatggagaaggtacaccactcgttggtgggggagctcatcatcgaaatcccgagagcaggacttgtgggcggtgcttgaaggctaggcacatcctgccgccgcttgactgaggcaggttggtgccttcccctgtgcggctgctcaagcttgtgctctttggccaccaaatacagggaagggacgtgttggcttcgacctctccacaagaagccctttcgaatcttgtcaatagctttcaaagcccattgaggaaggtcaatggccatggccaaataaacaatcattcctgtaagaacagactgcaccataactcttctaccagccttgttcattaaatctgccttccaccccggaagctgagctgctaccctatcaatgatagattggatggccgatctcggaagcttcttcaaggaggcactccgagatatttacaagggaagcttgatatctcacaaggcaacatctcctgtaaggtctcaacctcagattgaccacactaaataggaaagacactactcttctgaacattattttgaagtcaagaagcatctccaatcagctgcaaaatatccaagaccatatggatgtcctgggataaaggacgaagaaacagggcaacatcatcgacatagatagtggtccgatggttaagaaatatagatgtagggattgaagcagccattcagctcctgctgccatcaccaagtgacctagaacatccattacaagaataaataacataggagataaggggtctccttgcctaaggcctatcctgtagaaaatagtgttccctggtgacccatttaacacaatccacatagatgattaagagaggagaccactgatgatatccctccgaatctgtccaaaaccaaggtgcctcagaacttccaatagaaatggccaagagaccgaatcaaaagctttagaaatgtcaagcttgaacaaaagactagcagactttcgcttatgtagacagcgagcagtttgttgcgctaacatgaagttatcctagataaaacgccccttaataaaggcactctggttgagggagcccaattcatgtaatcgactagcaagacaatttgccaacagcttagtaaaatttttagcaaaactatgcaccaaactgataggtctaaaatcttttacaagatcagccccttccattttaggcacaagagtgataaaggctgagttgagcttatggaagttacagaactttctacaccagactgctggtgccatatgcaggcttgttgtgtttaagctatatatataggtctaaatgtgctgcagtgtcttattttgtcatatcttggagattctaatagattttcaaagtttaagtgataattattacaggaacaatgaagatctgctgatgatggtactccctgattatttgctaagttcatttggagtttccttttgggggtgtgactgtctgagttgtagcctttttactgcaaagataacatcctttaaatcatgtacattatttttcctttcatcttactatgtttctattattgttatacctgcaggtattcattgctcaagagcaaagatgtctaaggaggctttggattagtgaccgaccttgctggactatctcttttatgtctgaaatcaagcgtagacgtatatatattaaactagttgaatctacaaggagtgaagatttcagtgagagcaaaatcattaccatttcctttttgtatgcgacaatgccagtttggttgttgttctttgcacttggaatatcatcagataaggaagtgtttgatatgatagatatgcaagattgtgatgcttctgttatcaacacgatatctgcaactatcaaagaatctgataaactgtgtgaagacttccgtaaatcagataaagctcgtcaatatgttgatgagttggtaaaaagttcgagatttcctccagcggagtcctttgatgactatattgctaggtttctctttcctgatattagtggaaatagaaacaaagcacttttcttagggtacatggttaaatgtctgctaatggcttttactgggaagcgtaaatgtgataataaggatgatttcaggaacaaaaggctggacctacctggtgaattgcttggaagggaacttagggcacagcttaggctggcagagaaacgcatggttaaggccatccaaagagatttgaatagtgaccgtgagttacaagatcttgaacgttatatagatgcatcaattgttactaatggtctaaatcgtgccttttccactggttcttggtgccatccgtacaaaagagctgaacgatgctcaggaattgttgcgactctaaggagaactaatcctcttcaaatgatgtctgacttgaggaaaacccggcagcgggttgcttacgctgggaaagctggtgatgcaagatatccgtaagtaacttatttttcatcaaccaagtattgcatgtgcatcttgtgcttttgtatctcctaacgttgagtgacttaagactaaatccctacgtacaggaatccatcctattggggaaagctatgctttatgtccactccggatggtgaaaactgtggacttgtaaaaaatctagctgttactgctattgttagctcaagggtgatgcagcccttgattgagagcttcatttcttgtggaatgagtaagctgaatgacattcctactgaacacattcaaagaatggataagatctttttgaatggcaattgggtgggatcttgtgaaaattcagcttcatttgtatttcgattgaggtgcatgagacgcagcagtctgattgatcctcaggtgacctcttttttccatggctggtcactttctgctttaacttatttacagtctttactaagatgtttggtgtgcaggttcagtatatgtacactgtttttgttttagaagagtccctatttcttgtcattgattaaaaaaaaaatcaaattttatcttttgtatacattgatcaatatgacttgcttataaagcctgcttgaataataaaacttgacttgtgggggtaagacaaccctcgggtattgtattaagaagactttctcatatatgtcaagaaaatccctgaacccttcctcgaacacctgtcccacccatacacaatggcaccgtaggccatgtgagaatggccgcgacagcagctgggtcttagacctgtgctcgagggactggaggagtgttacttagaccacctaatcaactcagacagaggtccttttgcaagtctgcttgaataataatggttttcgttggctcctttgcaatgttgatcatctattacctatttttttaggataaatatttttttgtaatttggttaacaagtgagttaaaattttaaataggttaaaatcatttcctatgaagttaccaggatgttgtattagtttgtttggctcttttgcaattgtaaaggatatataccaggggtaccctaagtatattaataataaagatgttggcttgtgggcccaactcggactcggactcaggagaacccggtccacatgtcaagatgaagtctgcatggtcgaataaggcaagggagattgtaggatttgtgtcgtacctgagtcgtatcatcattgtaacagaaatacccgatttataagggaagtatccgtagcgattaggatatgttatgatcgccatcccgtgaacagccctattaaaattagttggttagataaacattcggttagttagtctcggataaagtttgttagggcttgttatcttaatcggttggattagatagactttgttagggtctgttatcttattcggattggattagtcttagatagagtttgttagttgttggtggctgctatctcagcctatatattgtacccctttggttaaggaagaaaccaagcaggcaagtaccttgtcgtgcttcccccacctcgtctactgtttggccatggtactgttcattgtctactgttcgtccgcgagtactgttcgcgcgtgaacagtatcacactttccccaaccagcagccctagccctaggacgacgtcacccaagcgctggggtcctggtcctcgaacctcccacccaccactcgtactacctccgtaaccctagttccaacatgatagggaattagggatacctgtaactgaaatagatcaggacttgaatgtccgagtccttgtctggtatggccacatgtttcttttccttgtaaccagaaaacagaagggcaatgcgccccagaagggcagaaaaacagaaaacagaagatcatgagaataaccaccataatactagatgtagggtattatctcatgacgagagcccggacctctgaatcttgtgtcctttgtgtctttactttcaattctttgatctcgcgaacaccatacaaattcaccgttgcaaaatccttgacagcaatcttgatgctttgttcccattttttgaggataattattttgttttcgtaatttggttaacaaatcagtataaataggtcaaaaccattttctttgaagtgaccaagttgttatattagtttgtttattattaatttctcaaattgtgctctgtctttcttttctgattcagttaactgctgaaaatttcctgcctatctcgactgttgtgtttgagtcatgtaattttaggttacttccttttctcaatgctttaatctcaggatgttggttgcttttagttgttgacaccttctcagtgctgcatactaatattccacaccaagatgttctttataatgttttatatgtttcttgtttcatcttgttaggttgaaattaaaagggacaagcaccacaatgaggttcgcgtgtttactgatgcagggcgaatcctcagaccccttcttgtggttgagaatctgaataaaatcagaaaacctaaggggcgctcattctctttccatgaattaatgcaacaagaaataattgagttcattggtgttgaagaggaggaagatatacaatgtgcgtggggaatcaggcatttgtttgagagtgaaggtgcgatatctagttatactcactgtgaactggatccttcctttcttctgggattaagctgtggtatcattccttttgcaaaccacaattttgctcggagggtattgtaccaatctgaaaaacactcgcaacaagctattgggtactcaacgacaaatccacacatcagagttgatactctttctcatcaactatattatcctcagaggcctcttttcaaaacagttatagccgactgtcttggcagatcagattatgcttcttttggaagaaaaaatgatttcgcgagaccagaatattttaatggacaaaatgcaattgtagcagtcaatgttcatcaggggtttaaccaagaggattccctggttatgaatagggcttctcttgaacgaggtatgtttaggactgaacacctcaggagctataaggcagatgtagaaaacaaggatggaaccaaacgactgaaattgaaggaaaaaatagactttggaaaaacagaaagcaaaagaggacgtgttgacaatcttgatgatgatggcttaccttacgttggtgcaagtcttcagaccaatgacattgttattggcaaagtctcagaatctggagaagaccacagtattaagctgaagcatacagaaaagggaatggttcagaaagtattgctttcagcaaatgatgaagggaagaattttgctgtggttactctaagacaggtaagaccttttctggctgcatctcactcacatgtcttgagatagattgggatgggaaattagttatttttccaccgcaccccaatctctcaacacatttgaatgaggtggatacgaatgcagccaaaagacctaaatgacatttgtcttagcaaagaattgaccattaatcaatagtacattccttgaattctcacttcactagcgcgcatacggatcttatttgacaatagaatgcagcattctgtaactgcattgattgtcagttaagcttgttacctgttttgtgtgtcaggtgttgttatttaacccagtagttatcttgctcttgagtgattattgttggccttcttgacattcctttttaactcaaaatattaatgaattatctatgcccatattcttgccatgcaattaagatgagatcatgaatgataagaaagacaagcatcaatgtgcgctcatgggttatgggtatttcatcctttctggttaaaataaaacttggtttgacttttattacctctcttttcttttacaacagttgtcactgttaacttttagggtgtaacttcgagacacacacaaatatttctaagtacatatattcgttgggtaccattgctggcagttctaacagtggtaatttcacactattgaaccatatatctagaaaaaaagtataaataattagaaaatcaaagctgacaagtattgtgaaacaggggtagtacatttttatggggttcagcactttaacatgattccatcgatccaccccacgtccccataccccaaaaaagtaatataggaatttggcttcttgttcttgacttttagaaaatgaatgagcccatatagggtgctggcttggttgggccagcagctcaactcaccctttttcatttccttagattagattccttcaacacttgtaacgtgacttctaattttctttgcgtccccaccttcacatttacaccacacgttactttttattgaccatttaaagttctctttgttgatctgatttaggttcggacaccttgccttggagataagttttccagcatgcatggccaaaaaggtgttgttggttttctagaatctcaagagaacttcccatttactcacgaaggtatagtcccggatattgtgataaatccacatgccttcccaacacgtcaaactcccggacagctgcttgaagctgctctggggaagggaatagcttgcaaaggtacaatgagatatgcaacaccattcaccacagcatcagttgacgttattgcagaacagttgcacaggtaagtgtttcttctaacggatgaatagctgcttgccttaattcagtaacccaccccttgcacatgaaacgaagatctgagaccctttcaaagggttgggcattttttagcctcttctaggtgaactttgtaattgttaagcttattaatacatcttataagaaccttggacgtcattaatgcaccctatgctctcaagtcttaactctgttagtactttactgcttattacacatacagaagaagaaaagggaaaggtagggaaacaatgtacacagagagagagaacagaatggctggtggccatcctcatattttgtatatgagtaaacatgtatcagtaatttcacatgtatctttttgtcatattttgcaccaaaatggtggaaacacacgagtttccttcccgtttcccttttacttgtattactatcagttgctgcttatctaacggagacatccatattggtaccgctaaatataaaactgagtgcactcacacactactatgttctcagtgaggatcttacttcagataatcaagtgatgtatctgattttttttgtgtgtgtttagacttgttttcgtctgtgacttgtttagttaattttcaagattttatgtatcttgttgcattgcagggctggttattcacgatggggatctgagaacgttctaaatgggcgaacaggtgaaagagtgcaatccttggttttcatgggccctaccttttaccagaggctgattcatatgtccgaagataaggtgaaattccgtaacactgggccggtgcaccccctcacgaggcagcctgttgccgacaggaaaaggtttggtggagttaagtttggagaaatggagcgtgactgcctcctcgcccatgggtcagctgccaacctgcat

SEQ ID NO: 693 - DNA, 13811 bp, Zea mays
  source 1..13811: mol_type = genomic DNA
gatacaaactttttctcagctgaaaaaaaccgcaccccaggcagcggacgggccagcaggagggcggcgcctgtccagtccagagctgtgaaagagacactgaccggtaggacccagccaaatgggaaggcacgtcagaacagagccgcaaagctgagcaccagcgggcagttgcgattgctattggtgaaacgcaggaggaactcacggcccgggcgcacggccacggcgagcaaagagagcgtccactgtactgtactccctgcttctgttctggttgcctgcctcctacagtagcatataaaggacagcaaaagcacactcgcctcgcctcgcctctccggctctcccgtcctcggtcgcaacgcggcgtggaaaaccccaaccggcgccggtgcggtgcctgcaccgcgccgtagggtttccgcctcgcctcgcctcgcaaccggcgatcgccggcgcgcaaaggtaagcctctccgtcctccgtccatttcagcgccccgttgccacggccatctcgcgctcacaccgttccggtccgcctgctgcgtggcgcaacgcggcgtttcctctgctctcatgggcctgcactgccaggactggatcgctagctcgcggcatgggctggtgtggtgcacgcgtctccctcgaaaaaaatagaccgcttttttttccgtttctttgtttggttcgcggcgagtgctttggagcccgtgctccctcgccgccagccgcgcgtggttttggcgcttcgagcatcgtcgacgtcgtggccttaggtggacgggacaccccgcccctgtccttgttattttgtgtgcgtctcatggccggggtgtggttttgtgttgctagtgcggtgctgaattgttgcggggttttggtggtgccccgtgatcatttgatcgggacgcgtggtggcgagccctcttctgatttctaattcctaagatgatggaaggttgcgaactcgccatacgtgatgatgtggtgggcctgcctgcccaaatcgccataaaaaaaggaccagagagggggacagtggtagaaaaacggtgcattttgctggaaaatctttttttcttttggcgtgattggtactgctacgcctgtaaggtgctccgtttaggtagaattctgtgaagtggatgtctgatgtgtcagttttttataaaggcagcgtctttgcgcatgcatctgcctgagaaattaacctattgctgtttcatttgcggaatgccaggtggagccctgggcgcacatcttatactgacctatctcttttggttaagaaattgaaaagttgtgtccttacacaaatcgtgtatggtttcagtgtttgttgctgaatgaatgccatgtggatgcagcttttctgatcttctggtttcaaaattgtgcaattccatgatgactgtgctgattatgttgtttccctgttctactgtaaaggaagggattttgttgacgccgagtgccagatgccaattgtttagccatggggaaaccacaaaccgatggtgaccagtcacctgtaaactcagatactgatgtgatggattgcctgaacttcgatggccatggagatgttgaagacccccacaaggaggttgcaaaaggggagcagcagccttctggcgaagttgatgaacagcagtctgttatggatgttgatttgacatgtataacatctgtgggagatgaagggaatgaaaagcagaatgctatggatgtggatttgaaagaaatactatctgaggaagatggaggggaaggaaaggcttcttcagatctaccctcacaagtaccagtggatttcaacgttgcaagcctcgagaagttctgtaaagaagcagcaagatcgtttttcagtgaaactggactggttagccatcagataaactcgtacgatcattttgtctcccatggactccaagagctctttgattctcttggggaaatcactgtggaacctgattatgacccttcaaataaacatggtgcttggaaacatgcaactgtcaaatttggtagggttaagcttgatgagccagtgtttatgcttgaaaattctgaccttgaagagcaagatctcaaatttaagcctagacatgctcgcctccagaagatgacatatgcgtctaggatgaatgtggaaatgactgttcaggtcaggatgtcctaattcatgttacatatcaagtaaacagtaggggtaaaatattatgtacctgttaagaaagactaaactatatataatataaatggaaaaattaaaaagatatcccagaaaagctttcttattctcttaactagtatggatgatgatgtgaccatttcagcctttttcttatatttcataaatgacatggaaattagtgagattaagctcctcctcgagttcatttttaactttccttttgatggcgcaatagccataatgatgtcgcttatgttttccccccttactcagcctccaaaactcatgtagactttgaatgtagctaccactgtggcttggcattctgcttgtagtattgccatgtttgatataatgagcagcagatgtgattcaaattattctggcatgtgtaatcaagttatgaccttgatctttgtatcaataagatttctactgatattttaccatctgaacaattaatgttttgactttattaggtttatatattcgacacaagtgacaaagccaaaactggcaaggatacacatgttcataaaagagagataatgacagaaactaaacaaatcaacattggattgttacctgtaatggtgaagtcgaatttgtgctggctgcataaatctcaaaaaggtgactgcccgtttgattttggtggctactttttgatcaaaggaacagaaaaggtaccaccttacatgatccatgctgctcattcaattctcagcaaatgtatttgacaaagatcattgcattatgcattctgcgtttagttggagagtcaattagaatggagtggttccattctagttttttagaatgtagccgttttattctccgtttggcaagtagaaccgagccactttattttttgtttggttaaagagtaaaatagagcggagccgctccgttctttgttgttggagagccatatgagtgtagagggaagaggaaggagagcactcgcgtctgagagagcgctcacatccgaccattttggtggagtgagagcactccaactatttatggtaaatttctatatggagattccaggagccgttccgctcctcttttgttggaaaccaaacatccaaaaaacttgaatggagtcgctccattctcctcaactcttcaaccaaacacacaatttcttatagattttgatggtgctgcaaatatattatgtatcgggtgaggcgtgcatgtaagatatttagtcagcagaaaagaggttttatggttcataatacatgcggtgactctatatggcactgctatgcaaatgccctacacgcttactatattgcccatctttttcaatagtttaagtttggccattggtgaactaattagtgcatgaaacttaatatgttgtcagacacagaggttttgagttgagacctggttatcacaagtttcacaaagggcgatgaggaaagtgaagtgtattactgtgttacttacctttcccaatactaaaaaaactcggccggggaaggaaagactactctcctagtattatattaagaagagacgaaacatggtcctggccgagaaaaccctcgaaccctagaccccatcactaacgggcagatcaattgtccactctgcaacggcccagccgtagggtggcgcacaggattctgttccccgagagctggcggggcatagtgaggggatttttttaaccaaacctgaaattcacccctgagggggatcaaacccaggacctgaatgtactactcgaaagtctcaaccattacgctagaggccctttcgcacctttcccaatacttaagggagagatagatgatggagactattatggcctgtcatacatatgttttgtgaaatttcaggctacctcaaatgaagtttacaaattttagcttgacaagtgttgtgataagtattatatgcgtgtggtcaaagttcaaatcaaatatttatatcatagttttcagatcgccttatcgcctgatcgatcccactgggcggttagtcgcgatcaggcgtcgatcagggcgattagtcgcccttgatcgaccctaatcgtcctcctagtcgtcctgtgtattccaggatatatatatagtcatatatataacactatatatatatacttatatagtgtagactatagagacttgcagcagtataaatagtccaatattcaatacttgaatagtctaaaacagaagtacatccagcttactagaccaacacaaggcctccataaggagtgctttgtacctgggtccttatggccctttattttccctctactttaatatatgggtgcgcagtcctcctgcgctctttcgaaaaaaaaacacagcagcaacaaatttatatgaaactgcaagtctataacttactagaccagtagaccatgaccaagaaggcttcagatgaggagctctccagtccctgtgttctcttttctccgagccgatgtagagagaaagatgttgctgtgctggagccttggagggagagagaagggtgaagaaggaagagggaagggagctgtgagagagtagggtgttttctgattttctcccagccgtcagggaagctgaaaagacaggtaaagctgggggtggctacctctattaatcatgggccagtccagtcaaacagactgttagactacccgatcacagactggactgttggggccagtctagactgttgtagtacctctattaatcgtgacggctcctaggcgattaatcgttccatatcgttgcctaatcggacgatatggacgatcagtaacactaatcgagtcgaacaccctaatcgagcacagagaaacgatcagcccgactaattgcgactaatcgattagaaaacaatgatttatatagtaggacgatggtgcttcatatttatgcatggaaaatgttctgtaaccttgtcaagaatttctgtagttaacaaattatcattgaagttaagaagtttttacctttttgatattgaacatgtttgacaccatgtctgggtgaagcatatctcattatgattgctttaaattctgtaggtattcattgctgaagagcaaaggtttttatcaaggatttgggtcacagaccaccccagctgggatgcaagttacctatctcagatcagacgagaaaagatcaatataaaacttgttccgtccaaaagcaatgaaagctgcaaagtcataaacatttgcttcatgggtacgattatgccaatttgggtagcattttttgcacttggtgtatcgtcagacaaggaagcttttgatatgattgatatcctagactgtgatgctgacatagttaacataatatcattaactattaaagaatctcatgaagaatttgaaggcttccgcactccaggtagagcccgtcaatatgttgatgagctgatcagaaaatcaaagtttccgcccaaagaatcctttgatgagtatgtttgtaggtatatgtttcctggtgtcaatgggtttaggagcaaggcacttttcttgggttacatggtcaaatgtctgctaatggcatactctggcaatcgaaaatgtgataataaggatgatctccgtaacaaaaggctagatctttcctgccaattgcttcggagagaactctggactcatattaaaagagcagaaaggcgcatggttaagctcatgcagagagatttgagcaatgatggcaacttgcaagaccttaggcgttatgtggatgcatcaattattaccaatggattgaaccgggccttctccactggttcttggcggcatccttataaaaaagaaaggtgttcaggggttgtagcaacccttcggagaacaaatccacttcaaatgatgtctgatgttaggaagacgcgacagtggtttgcatatgctggaacggctggagatgcaagatacccgtaagttccctgttcattcgcacaaaaaaaaaatgcgtgcctactctcttccttttctaatatccatgtgcaagctgactttcattttgcaggaatccatcctactggggaaaattgtgttttttgtccaccccggatgctgaaaaatgtggatttgtgaaaaaccttgctgttactgctgtggttagttctgtagtgaggaaaccgttgattgatacatttgtttcttgtggaatgaagaaactggatgatatttctctacaagatatttctgggaaggacaggattttcttgaatggaagcttgctaggagtatgtgcagacccacacgaattgactttgcgtttaagaagcttgaggcgtagcaagctaattgatcctcaggtctgctcagtttctgtctctgtcaaactaacgattaattgtcttgaacctcagttttcagaatcaggatagtgtcttactcccgttcgtggtctttgaaaactctcctaaaccattattcatagtttcaattatttttcaatatattttaccttgaactgtgatgagtcttgtttccttcatgtatcgtgatagatttcactgcgtaataagctattgattactgaaagttgtttcttgagtatagttgtgctcttgtatctactggttaaaaaaatttcatagcaattatcaacaagggcagacctatgccgagactcctgcatgagttgggactagggaagggataaattaaggcaagccttctctgcaattgcggagtggttgcttaacctttaatatcgtactcactttaattatcttgtgattagtcgataccattctaattttctcttgctcattactagttttcctttaattcgttcaagaactagtttcctttacataatctaaaaaagaaagaaagacctttacgtggtggatctgatttcatgctcatggaattctgaactgaattggtgtatgtttatgaatatccaatatatatttttgccactaggtggaatatggatgttttgttacatgtactatttctgcctcaatggaatacttaaaagtacatatgttgcaacaagttggtagtaatactgataggttccttgaccttgttgtggttgtgaaatgcggaaggatgtgagattgggggtagggatgcgtaagctgatatatggaccactcacgaacaaaggccacaacaacgagggtgcgaacaatggtcatgtaagcaaaagtctcattataatcacgctcatgtttctgctagaaaccacggataactagacgagccttgtaacgctaagagaaccatcagagtgggtcttaaccttatagacccacttacaggtgatatgttgaacatgaaggggatgagcaacaatctcctaagtgctaatatgctcaagagcgccaatcccctcagacatcgcaacttgccattcaggatgaagaatagcatcaccataagaagttgtctcatgttccttctttatgtggcttgttgcccataaccgttgttggacagcagaccggccggctaaaaggaaccttccccatcccactctttatgttctttgcgaccagggaaaggaaacttttttttgaaaggaagcggcaaaagacttgcctcttcaatatattagaagagaaatagataacagtcttcagaagacggagcaaaagaaaaaaaacaaaaagaagaaaaacatacactaactcaatctaacatacactgcagctcccaatttgatctttcaccaattgcgtaacctggatagcagatctttgaagtctctgaaagattctgttatttctttccaaccatatattccaccaaaaagagatgaggagtccatcgaaaatcttctttgactccttgcagcaacggttccttaatctcttccaccaatcatacaacgagccgaggtcagaaacgccacttagaaaggatagattggcccaagataggatcatgttccaaacctctacagaaaatgggcagtctttgcctaaatgaggcatactttcttgtgataagttgcaaagacaacaaattggattgcaaggccatccccgcttttgtaggctgtccgcagtcagaactctgttatgcaacatggtccgcgcgaaaaaacgacattttggctcaattctcgctttccagataggagaaattttgattttacaaaaattcgttgtaaactgaattttgtatgcactacttgaactataactcccatccgtcgtccacctccataaaatagtatcgtcgagatcattgagttcatgagtgttgttgataccttgctagagggaaatgaattcttttatctcatcctcatgtgtgtaaggagaacaaaagtgcatccagcgattgtttgtaagggcttggcacactgagatatttttcctctttgctttcatgaataaggttggcgcaatgttctttggcgtctgaccctgaatccagcttgatctccagaaattagccattttgtcatcaccaattgttacaatcgtagatgcattaaatagatcgacatctgctttatcacaaggtaattgcaactcagtccatgctttgtctctattcgtccatcgtagccacagccatctaagccttaacgctcttgcaaagcgctctagatcgagtatgccaagacctcccttattctttggcaaacaagttgtagcccaatttatcaggcaatgacccccactacatgaatccaaattttctcctttccaaaggaagttccttcttatcttgtcaatccttttaagtaaccatttctgagctgggaaaacagttagaagataaatcagttgcgctgtcaacacagatttaaccaaggtttcccttcctgcctttgaaagaagcctacctttccacccagcaagccttttattgattttctcatttagaggttgaaactctattcttttaatattcctgaagtgaagcggtagcccgagatacttgccagggaagttagagtacttgcctggaaaaacttccattaaatttgaccttaaagattcagggtaacgtattgggaaaatctctgttttctcaaaattgatctttagacctgaacaccattcgaaagcttctagaattctttttagaatgctctaacaaacacccctgcatcgtctgcatatcgagaacagcgaaactttgccccattgggtaatacctggcccagtagcccctcatgagctgccctttcaatcattcgttttaggggatccattgcgaggatgaagagaaaaggcgatagtgggtcaccctgacgcacccctctcatgtgcttgatttctttggtttgctgaccattaatgatgattttggatgaagatgagccaaggatggtagcaatccaatctctccatttttgggtgaagcctagggctcttaagacgtctagaagatatgcccaattaagagagtcaaaagcttttgatatgtctagcttgacaaatagggctgcttgtttgctcttgtgaagttttttaatcactttctggacgtagaggaagttatcatgaattgatcgtttttgaatgaaagcattttgggtagtggagacaatttcattcatacgcggaggaaactattaaccagcttctcgttggttgtgtgtttgttagacaattttagttctgtttttttgcaaaggctgggtatgttcgtccttacacctcaacccgggatggagtccttcatggaatggtggctgtaggttgtttcggaggcagataaggctttgaaggaggggttaaactctctcatcatattaggggcatggatcttgtggaaacacaggaatatcattgtcttcaatggagcaacccctcatctctctagtctctactgctctctccattgctggagaggaagtctggtgctgaaacaaggccgatgctaaaggcctccagctccagttggcacaggaggatgaggaaggtcttttgccttagagtcgtcaggtcgctggttggtgctgttgggcttagcccgctctctgaagtccaaccttgtttgtgtgtgtgtgtgcctaagcctttggccagacggttgtatctggtctattttagacctttctttcttcttgatataacgatacgcaacatcgaaacctgacatcgctgataccagttcgataggttccttgaccttgtcgtggttgtgaagtgcgtagggacgtgagattgggtgttggggtcggaacctctgatttcgagaaggcgtcgtggtagctagggtatagatcagtagcgcaatgacaactctcaggcaaagctccgattgacattgcacctagcttgtaccccctggcatggcgcaaaaatagatcggtggctgaacaattggttaacctcaattggacgagaggtctctggagaatggaaaatgttcaacagatggctgaattcatacaattgtggaaccatattgagggggtgcagctcaatgaccaggaagattgcattcggtggatatggaccgagaatggagtgtactcttccaaatcagcttatcttgcacaattcaagggctcttacagtgctttcaaagaaaaatctatctggaaggcgcacgccgaagggaaacataagttctttgtgtggctgctcattcaagcagagatcctcacagcagataaactaagtcaaagaaattggccatgcaatcctctgtgtgtcctttgcgatcaagagccggagactgcgattcacctttgtctcaagtgcccttttgctttggaagtgtgggagttagtcagatcgtggaccaataatctgatcatgccgcccagctcagatattcagagcttcgattcgtggtgggctgttgtgctccaaaacaaatcgaaagaagaccaactcactgtttcgggtttgcttatgtacttcacctggaatatttggaaggagcggaatcggcgtatttttgagggcaagcaagcatcgacacaagtggtctttcatctggccaaacaagaaatggcgttgagacgagctgcagttgggcatccatgtgtagtgtaatgtcttctcttttttggattgtgtttgagtgtttttcgttatatgtaataacaactttttaagactcttgtttcccttctctccttaaatgaaatagcagagctcctgcactaagttttcaaaaaaaaacaaggaaacataacacgtgggtggctcttgaatcctggtgaagataattgtgttgtttgccttcatctggctacatggtctctatatttgtagtctctatttatagtctctagaggacttatttttccaagctaactagggtagccctaacaaatagttctattttgtaacaaataattctatttcctaaacgaggaggagcccttgtcgatttggattctcttttgatcttttcctaataaatacttctatttcctaaacagatactgtttatgcctattgcatgtaatttgagcccaatacctgcgtgggccgttttatggtgcgcataagatataccgatcataacaaatattgttacttttcctatttttaacttgaataggttgaaatcaaaagggacaagcaccataaagaagttcgtgtattttctgatccaggcagaattatgagaccacttcttgtagttgaaaatctaagaagaatcacaagaccaaaagatggactatactcttttcaggaacttatagatcaaaacatagttgagctgattggtgttgaagaagaggaggatatccaatgtgcgtacggaattagacatctattctccagcagggagaaagaagactggtcttcttctggctatactcattgtgaacttgatccttctttcttgctagggctgagctgcagtctcattccctttggcaaccatgataacgctaggagggttcagatgcaagctgaaaaaatatcacagcaggctatcggctactcccctacaaattctcagtacagactggacaccctttcacatcaaatgttctatccacaaagacccttgtttagaactgtggtgtcctacggtcttggagaggcgaagacagactgcagctccggacgaaaagacgacttcaacacaccagaatatttcaacggacaaaacgcgatagtctcagtgaacgttcatcagggattcaaccaagaagactctctggtgatgaatagggcctccttagagcgtggcatgtttcgcacgctacatttcaagagctacaaagcacaggtcgagaacaaagagatcacaaggcgtctcaagcacagggaaaacatcaatttcggtaaagtgcagagcaagagggggaaggtcgacagtctggacagtgatggcttaccatacgtcggagcaagtcttcagagtggtgacattgtcattggtaaggtcacggagtctggtgaagatcatagcgccaaactgatgcatactgagaaagggatggtggacaaggttgttctttcggcgaacgatgatggggttaactttgcaactgttactctaagacaggtgagtaataaacctttgcaagattattctgcatgcccaccacttattgtcaatcttcctagtgattagtctaataccccgtttcaattcagtctcgctcgccatgcgtcggagacaagtttgccagcatgcatggacagaaaggagttgttggcctgttggattctcaggagaatttcccattcacttcccaagggattgttccagacatggtcataaacccacatggttttccaactcgtcaaactcctggacagctgcttgaggctgctctggggaagggcatcgcccttggtgggaaggtcaggtacgcaacgccgttcaccactccgaccgtggaggtgatcgccgaacagctgcacaagtaagtccttatgaaacatgacggattcttatggagtactttatcaaggaaaatgccatagctgcagccttcttctcatgtgtcatgccaatgccacaccttgtcgcttcggtttgcagggccgggttttgcaggtggggtgaggagagcgtgctgaacgggcagaccggcgagcggatgaagtcgctggtgttcatggggccgaccttctaccagcggctggtccacatggcggaggacaaggtgaagttccggaacacgggtccggtgcacccgctcacgcggcagccggtggaggacaagaagcggttcggcggcgtcaagttcggggagatggagcgcgactgcatgctggcgcacggcgccgccgccaacctccacgagcggctcttcaccctcagcgacttctcgcggatgcacatctgccaggcctgcgagcgggtggccaacgtcatcgtgcgggccgccgagggcggcggcggcaagaaggtgcgcgggccctactgcttgttctgccgctccgcggagcgcgtcgtccgggtcgacgtgccgtacggctccaagctgctgtaccaggagctcttcagcatgggcatctgcctcaagtttgaaaccgaggtccgctagaacgaacgccatggcagttcaccagtgagactccctcgatgcatatgcaagtatgcaactgcactgcctaggatcttggtgctttatgggctggtgttgaaacctgcagttttggcggcacgattttctgggcatgcattcagtagcaggcactggttgatactgtgattc

SEQ ID NO: 694 - DNA, 5413 bp, Zea mays
  source 1..5413: mol_type = genomic DNA
cctgtaaacccaccaatccatgctgtccatgcctagaaacctatctcttttttttttcacttaaaaagaaaagaatgtagtacttttctgtctctctaaagtagtgctattctggattaaagtacacatgctgaatgataaaaccataccgcagtccatatgtaggaaaccacaaagtttggcctattctgatgatagctgcaggctggtccttggacttgggccaacaccaaatctttattctgccgatagttactcatttggtggaaacgaaacttatgaatcttctagtttgctcactcaatattgtgccacagctgaacctggtttaatgttgggcctttcaagatgcagctcgagaaatttacaatctgcaacaacgagtggtaggaagaattattcacctgtaagaaagactggtatcatctttccgctcattgatgagggttcaacttcagcaacaaggaaacaaggtgctgccacttctgttcgtgccaagatcaggagacttttgttttaatagaacatctccagacactgatggccaacagcatgagggaactggatgtggtactgaaagcgatcatgatagatctctaaatcatcacgaggtatccattacagctgactgttcgtttgctgcaacttctggcacaagtagtgagcagaggagtcattagcgtcatccaaagaaatgcaggtttaacgggtgttggaaaggtgcaaggggtgcatcaggagtttgcatttctcatggcggtgggcagaggttgcaacaaaggtgctgagagtcggacaacattctgcaaggctcatggaggagggagacgatgccaagagttaggctgcaccaaaagcgtggcagggaagacagagttctgtatcgctcatggtggtgggcgctggtgtgggatcaaggaatgctcgagtgcggcaagggggaaatccggattctgcctaaaacacggtgaagggaaaaggtggaggatcgagggttgcactcgcggtgctgaaggtcattctgggctgtgcatctcacacggaggtggccgccggtgccagcacccgaactgcggtaagggggcgcagggaagcaccatctcttgataccacatcaggcgctggtccctggctcattgaagacgtcctccccttcgtgtggtctagaaggcaacggcccggatgacggagcgagccggagccagagatccggagtgaaggctgcacggtggagggctcttgtccatgcttggagttggaggcaacctgggaagcagttctaatgtttcaaaagcctgaaacgagaagcgtgtgacaaagaaaagaactgaggctattctgcatgcgatgtaacatatgcatgatttttcaattattgttgttatatgtgttgtcattcgatttcagcttttctcgttgccgttggttgggccgtctatccaaacctgtgctgtgataaaccgtgatctcgcacagaagatcacatgatgcccttgccctccttgatccccgctaaggtactcaccatgaaaagccgtatctgtctcggcggacaggacccgctcgtcactgagaccgggacccgcagagcattgcttgaccgctggcccgcctccgcctgttagaaccaccgggcatcgtcgacgccgccggttgcccattaaacccccgtccccgtctcgaggtgatcatcccgcagcgctacaacgcccgaactctccgtccctcactctcagtctccgacacattctacgaaccgcctcccactaccgctcattgccgccggtcgccggagacgcgctgcaccgccagctgtccgccttcgcccgccgaccccggcctgccgcagcttccccttcacccgccaggttcggatccaccacccgccgctcgtccgccgtctgtgagagtggggttgatcagatactcttgccagatcctttgtatttcttttgtttaggcgaaattcctaactaaaaaaacaaaatgaatattatatatatatatatatatatatatatatatatatatatatatatatatatatatatatatatatatacacacacacgagattttcctatccctaaaaaagatgaccccttcttcctatacattactaaggaatagtagtctttcttttataggtgaaatttgactggattttagtttataccccttccttgattatatgagacaaaaaacaagaaatgacaagaaagttctatatgaataaagaaatagaagaaaatgcgcgcggatgggggacccatttgctggtatatgcaaggataccactgctcttagcgctagcttccatttttgtcgttcttcagcgggcaacactcactagtcactagggaatgtaatttggtttggaagttcgacggattcaaagatgccgaacattgattcggatagaattttcggatattcggacttttttttttgcagataacggatacatgtacagatatatgttcggatatcggattcgaatacaatatgtttgatatccgtcggatatcgaatatccggatatcttctcggatatccggatatcttaccagatagttgtgtacattttattgatattttgcagaaagaaattaagaatacacaaatatcatcggaaattcatgaaattttatggagacataacatatgtccacatataatcttaaaaaatatttggaccataacatccacaatatatcagtgtctatttcatttcattttcacttgttgcgtaagttacacgagaaatcactctaaataaaattcatgaaaatttacgaagtagtggcatatgtacacacataatgctaaaaactgtttagactcagagtggataaatgattacaaccataatatatgtgtaatgatgtcttacatggtatccgataaaaaaattattaacgatgatatctgtgtccgactagttccgtattcgacatgcaactatccgtatttgtattcgagaacatctgtattcgtatccgaagctacccgtattcgaatttgaatccgaatagaaatatgaaaacaaacatggttttggtgatatcggtctgtattcgatccgattacatccctaacactcacattggtcggcatctgagatcctacgaaggacgaatgcagtttattttccatgattttcctgagttcagctgaatccctgtgcccccctatgtcaatttcatcccctggtgtcttttgattactctttagtcggcactgacttactgttaaaaaaaacatccggcagtattgatggggtttctctgttgtgacatgctctgttctaacattttatgtgtggcaattgtccagtttcttcagttcaccatcaattgacgatgagccaggttgttgataagtgatagattgatgtttatatatcattgttttctgcttcggtttttctgatatgtgctgtcacttgctccttggtttttatgcaactcggtgtatactgtataccctgacctttataaatgatttaacaccatcctaactccccttgcccttcatgaccgtattttttatagatcattaatgcgttagtggttttggtttcatgatcttaacagcccactctgtatggtataatttttgttgatacgattagtttctaattgattaatttggtgattttgtgatacttgctagggtataagctgccagtgcttgtgtcatggaagagctacagaaagacagtgcgctaccatcaaatagctctgattctgagccagaagctatggaattggatgacaatggagcaggaaaatcccatagcatcgagggaaacagggattctcctatagacactgatgaaggccagccatctatggatgttgatattaagggaaaatcatctctcaacgatgatgttaatggaaagtcttcttctgagccattttccaatcctccaatcaacatgagtgtggaaagcctagagaagttttgcaaagaagcgtcgaggtccttctttgatgaagttggtctgattagccatcagataaattcctacaatgagtttgtctcgcatgggctccaggagctttttgattcgctgggtgaagtgattgttgaacctggctatgatccttcaaagaaaggatcaggtagctggaagcatgcaatcatcaagtttgggagagtgaagcttgaaaagcctgtgttttggactggcaaagatgaggtttctgttgattttaaaccttggcatgctcgtctccagaatatgacatatgcttcaagacttagagtagaagtgactattcaggtcctgagtattttcattcttttacatgtccattacttgctctttataatacaatgttttccaaaaaaaagtgccacttgggtgaactataaaatcagtggtgaggaaagaaaagttacaaaaatgcttggatatgaatggcatgaacccatactatctattgtaggcaacacaaaattcagtccttctcttataagccaaacacacaaaccaatgccttggctactgagcaatattgacatgcctgcatgtcatttgcttgaatttccctggcacactaatcagtatagcatagttctaaatgattgaatattaaataaagcagcctaggattggatgtgtgattggtgttttgaggacatcccatcagtcatcagcactatagttattcttgttttctccatttgctgaattctatttgaagagcctattacatttacttattccttatgtatgatgaagctcgacatgaagccaccctggtacttgttttggtgtcataattgaactcacaattgtttaggttttatggtcacctgattatctgtgggttatttttcattgtaccaggtttattctttggagaaaagtgacaaatctaaaacagggaatgatggttttgttcaaaaaaggaacttcatgaatgaaactcactggatatttattggcctccttccagttatggtgaaatcaaacttatgtttgttgcatagtcttaaggaaagtgagtgcctgtttgatgcaggtggatactttttggtcaagggaatggagaaggtataactctgtgttctctgttgttaatgtattagtatgtaggaactttcaagtgtccttttgttgctggcatgggactatagctttcttagaacccattcagaaaacatgtacatgctcataagaggggggggggtccaaatatgattgtagctatgtaaaataggattctattgtatcgaaggatactttggcacagcatccgtttgagttggtctcctggtgccatatgccgcttcttgtgtttaaactatatataggtctaaatgccgaagtaccgatatgtgtatcagtattggaaggatatggatgcacggatacagcagtttttcaaaaaaaaaaaaa

SEQ ID NO: 695 - DNA, 7105 bp, Zea mays
  source 1..7105: mol_type = genomic DNA
ccaaatcgcctcaccaaccgaccgtatcgcaggcgcattcaatgcagggatcgtctgacaccttatcctgacacgcgtgcctcagtcggcaaggtcgaagtgaccgcagtcacttcgccctttcactgaccgacctgacaggaaaacagcgccgctcgccccgctccgactgctgtgccacccaccagggtgagactgacgacaaccaagttcggcctcgggcgcaacaggaagctccgcctcgcccgaccttaggcctcggcctcggaaggaggtcttcgcctgagggctcggcctcaacctcggcctcggaaggaggtctccgcctcgcccgaccccagggctcggcctcaacctcggcctcgggaggaatcgtgtcctcgcccgaccccggcctcggcctcaggagaaacctccgcctcgcccaaccttgggctcagaccaaccgcgccacgggggatacatcattaccctacccctagctagctcaggctacaatggaacaagactgacgtcccatctggctcgccccggaaacaagtaatgatggctccccgcgtgcgtccatgacgacggtggttctcagcctcctacggaagcaaggagacgtcagcaggatcccagcaacgccgacaactgtgcttctacagggctcaggcacttctccgacggccacgttaccgcgtacatagggctctagcacctcttcgacagccacgttggcatgtacacagggctcaagcacctctctgccagacacgttagcgcatagctacacccccattgtacacctggaccctctccttgcatctataaaagggaggtccagggccttcatgcgagggggtcgcgcgggggaacgagctaacgaacaggctcactttctctctctctcgcgaacgcttgtaacccctactacgagcacacccccctggtgcgagataatacgaaagccgcgtttctcccttgtgttccatctcgcgccaacccatctgggcaggggcacgcagcgacaaatttactcgtcggtccagggacccccgggtccgaaacgccgacaataatctaaattatataatccagattataatctagatctattataatctacatgtagttgtttggtagtttagaatatacaaatgtagattattcgtaaagacaacaatacccttatttgtttatttgaggtgagaaaaaaagatggcatatattgtaatttttatttacataatcatgggtagtgggttttttgccaaaataatctcaaataagctattcttgaggagattatgagattagggtttagattatataatctgaacccataatctaggtgtttgtttagctactagattatttgctctggattgtataatctagagagattataatatgaaacaaacagagccataggtcatggcaggccgagccggcccaaaaagtacaggtatagtggcagccttaaaacccctttttcgggcacaaacccccagccgtccgtgacatcgccgggatcccgcccggacctcacccggcgatatgtcgacggcggctcccgcgccgggctccacggccacggtgcgggtatccaacatcccggcctcggccatcgccgcagagctgctcgccttctttgactccgccgtcaccatcgctggcgcgaccttcgcctgcgagatagtcgccgctcaccgcggctggctcagccgcggccacggtttcgtccagtttgattcctccgccgccgccacccacgccatcgacctcgcctcctctggccgcctgccccccttcctcggctcctgcctatccgtctcccccgcccgcgctgacctcctgccccgcgcgcccgacctctccctccgcgctgccagcgcgagcctcattctaggcaaccgcgtcgccgagcgcgagctggaggtggcctactcctgcgacggcgtgcgggccgaggtcatcccgaggatgcggcgtgtggacctctacctgaagcacgattcccagagctacaagcttgaggttctctttgaggacatcaatgagtgctttgggtgccacctcgatgggacgggcgccatcttgctgcaggcgagctgcttttacaccatgctattcgtttcgatgcaaaaagttccaaaacctatgcacccagtgtgactatttcgaattgatagacgacacgcggatatctgattgatatgcactgtcttcaatcctcatttttggtcagccaggagaatgacccctagctcaatctgggtagagttgcaagtcacaagtaaatctatagatatttgcagaccaaagaccaatgacccagctttattggaatcttaagagtagttttactgtggttaccagtttattacaaaagataaggcttcaacaactctactcgagtctgacctttctatgtatagaacacttccaaacaaaccttcgtaagcaacagtcaccgaaagaaccttgactactgtcatcaaaactcgggaaacgaaatgaactaaccccaaatatcaataaaatgtccagcaaagaacagcctaggaggaaaaccactccacggtaaccaccagacacctttataagcatttttcagctcacaactgctctaccccttttgacagttgagggatcatctcctccacatcaacatataattggacctcaattctggcctaacaacccagtagaatgggagcacaatacatttacatacccgagtgggttgcagcctgcagatggagctcccttcttcctctagcgctgcacagaaggatatttttgcaatcttctatggcctgctatagcatatgttgtgtatcagcgttcaaaacaatcacactctaggtttccatatgattcatttattgcataatctagccactttctatttttaataactactcaacaatttgagatatgcacaataaactgaaatcctcataagggataagatcttttactttggaactgatcattaacttcatatttatgcaaacataatcgagtttctgctgaatgttatttgaagtatgtctttttcatcatatttttttgagagtgtaatctgtttaagatttattaacttaatacattgaagtagattttacaaaggatatgctatcaatttcttgtgttaatattatgcttcccctgtcattgttcgtgttaatagtaatctgcccctgctgaatacacattatctgcaacgatatatacttaatgcttgccatatttcattggctgtcaatttatttcagctgcaatattctttgggcacctttttaatgaatctgaagctacactctaataaatagtatcatccttgcttcagctgacttatgcaccaagaatacacattgcaatttctgggtctacagttaaatcaaggtttacagatgatcgctttcatgcatgcaaggaggacgccaaatttgcatgggtcagagcactagatttcacacctaatagctcttttggcgagtgttccactcttgtcctgaaactgagcaaaggtgcatcagtatcatatattcttgaaagtttacccttctcaggagaattaggggaattggccattgcttcgatggatgtgtttggctcctcctccaatgtggttcctcttgttgactgcccaaatggcttttctgtgccttatgaagtactttttcgtctgaactctcttgttcacatggggaagctagttgccaggcatgttaatgctgatctgtttaaagtccttgaagatctgtcaatcgatactttaaggagaatatttgagaaaatgagcaaattaaaatctacctgctatgaacctttgcaattcatcagacatgaggctcatagcatgaatatgagaaagaaagccttgtccaacaagagggagagtggaaaattgatgaggtgttacagaattcacatcacaccatcaaaaatatactgcttggggcctgaggaagaagtttcaaattacgtggttaagtaccattctgagtatgcttctgactttgctcgagttacttttgttgatgaagattggagcaagctttctcccaatgcattgtcagctagaactgaacaaggtttcttttctaaacccttgaaaactggcctgtatcatcgtattctctccattctaaaagaaggattttgcattggccccaaaaaatatgaatttttggccttttcagcaagtcagcttcgtggtaattctgtttggatgtttgcttcaaatagttctctgactgctgagaatataaggaggtggatgggccactttgaagatatccgttcagtctccaagtgtgcagctagaatgggccaactgtttagctcatccaggcaaacatttgaagtctcatcatatgatgtagaagtaattccagatattgaagtcacaactgatggcactaaatacatattttcagatggtatcgggaagatttctactagatttgccagacaagtcgccaaattaattggcttagacccagctcatcctccttctgcttttcaaataaggtatgggggctataaaggagtcatcactattgaccctacatcctttttcaatctttctctgcgacctagtatgaagaagtttgaatcgaagagcactatgctgaacattacaaattggagtaagtctcagccatgttatgtgaaccgtgaaattatctctcttctttcaacattggggataaaggatgaagtatttgaatcgatgcaacaagatgacatgcacgaatcagatggaatgctaacaaataaagaagctgctttgtctgtcctagggaaaattggtggcggtgataccaagacggcagctgatatgcttctgcaaggctatgaaccaagttcagagccttacctattaatgattcttaaagcccatcgggctaataggctgaccgacataagaactcggtgtaagattcatgtccagaaaggccgtgttcttattggttgtttggatgaaacttgcaaattagagtatggccaagtttacatcagaattacaaagaatcacaaggagcagaagtacagtgaacagccgttcttttgcaacgatgatggcaaaacagctgtaattgtaggaaaagttgcaatcacaaaaaacccttgtctccatcctggtgatgtcagagtacttgaagctgtatatgaccctggattggatgctaggggtcttattgattgtgttgtatttcctcagagaggggaaaggtatgttttctattctgaagctgaaaaaaagaccatctcagaatgtggatttcaatttctctgtccatggctgtgaagcaacctgtctactgaattaagacaccgtatttgtccctgttagccatgttgcccatattatgttaatatccaattgtgtagcttacagttagccatttgggttaatgttaatgcttgcactatccttacttgaagccttcaaattaattaggcctcatccgaatgaatgctccgggggcgatttggatggcgacctcttctttattacttgggatgacaaactgattccggagaaggttgatgcacctatggactacactgcaacgaggccacgcataatggaccatgctgttacacttgaggtacactccttactcctgagtgtctctcatccgctcattttttctgaattatgtatactacgtatgatttgctgttcttatttggttaatgtcagatttctgtacttgcaaaatatcagtttatgaattgccgttatctttcccctgagacgatggatacattgatttgtgctgtctactgtattgagctaagaaacctggcgtgtttctaaaatgtgtttatgtaataaggattaaatccatgaaacaggccctgatagggcaataacgagcacaagaccatccagccagcatggtattaagacggtatgtgcattggctggcatgtggaagtaatctacctacttgaaaaatacatgtttaaaatgaaaaaaatgatgttttgaacctgaatatgctcaccgtgagcattcagcaaattcctgcatattttgccatctcgcttgagcaaaaatgttaacatctgcatgcaaatggttgcaggaaattcagaagcacttcgtcagttacatgataaacgataccctcggtgccatctccaccgcccacttgatccacgcagaccgtgatccactgaaagctcgcagccccgagtgcgtccagctggccgctctgcactccatggcggtcgacttcgccaagacgggagctccagccgagatgcccctggcgctgaggccccgggagtttccggacttcatggaacggtgggagaggccaatgtacgtctccaacggcgtcctcggcaagctctaccgcgctgccctgcggcacgaggaggacgcagaagcgctcctgcctgcgggcccaccgagctgcgtgtacgacccggacctcgaggtcgccggtttcgacgagttcctggacgcagcggaggagcggtacgaggcgtacgccgagaggctgggcgccctgatgacctactactcggcggagcgcgaggacgagattctgacaggcaacatccggaacaagctggtgtacctgcggcgggacaacaagcgctacttcgagatgaaggaccgcatcatcgccgccgtcgacgcgctgcacgcggaggtgagggggtggctcagggcgtgcaaggaggacgacgcgtcgagggtggcgtcggcgtggtaccacgtgacctaccacccggaccgccgcggggagaagcggttctggagcttcccgtggatcatctgcgacaccctgctggccatcaaggcggcgcgcaggtgccggaagcgggtggaagacgccgccgtgcccatggactgcgacggttcctagacggaggtgccactgtggcagtgaagtgagcctgtgatgcgagtggaaactgtagtaataagatgcagtaccgctgagcgctgattgctgtaaaaagaagttagcgcgggttgtcttgagctcctcctaacaggcgtacgtatggtggaaccgtggaatcatgatttgccgcccttgctgatgactagaagcaggtacggttagctaagccgttacgt

SEQ ID NO: 696 - DNA, 4654 bp, Zea mays
  source 1..4654: mol_type = genomic DNA
ttgtcgcttggcttttttcaatcgtgctttcttgattctttcattgcaatcaaactcacttgtaattgaggcaagagacaccaaacttgtggtggtccttgtgggaactttgtgttccaagtgattgagaagagaaagctcactcgatccgtggatcgtttgagagagggaagggttgaaagagacccggcctttgtggcctcctcaacggggagtaggtttgagagaaccgaacctcggtaaaacaaatctccgtgtctcacttgcttatttgcttgggatttgtttttcaccctctctcgcggactcgtttctatattactaacgctaacccggcttgaagttgtgtttatatttgtgaatttcagtttcgccctattcaccccccccctctaggcgactttcagtttcgcagtctgagtttgttacaaagaaacaaactaatactgagaggggctactattgggggccttcgtcttttgaaggtcatcaaaaacacgtttaaccattggtggccaagtattgcaggagcttcgacaccagaataccttcgatacaggacattggaggggcgacgaagctaacttcatcatagcgacacatggagacgatataaagagtcatcatggatgctcaaagcaaaggacaatgtgcccttgtattatttgtaaattctctgtgtaacccttgtgggtgtaaatataatttcgtacaaagctgtacgattctctataaatagatgagcagtgcccttgcataaagtaccttttgaaggctcggacaattgctgtgtgtaatcttttctctaaagcacattcactttaattcattctctagagtcgaaggtacgatcgtaaattcattatacgaaagaggaaatatgatattgatacatctgagatgagtcgttatgttaaaattcttttacattcttcacctatttatgcaattaagtcatgacttattcggacagcttaatgatgaaggttgatcatctttctaatattgtgttgccttattgattgtacataccaatcgggaacaagtgaccaacagctgcgactgttacgctaacaaccaacgaggaggagacgatcatgatcctctaatttctcttcatcgatgcgtgcccatgttagatcggcgctccaactagtcttccactgtactgcgtgtaatggtaacgattcatgatttcttaagatttgtatgtaatgtgatagatatgtcgagcaccgtagcacgtttcctaacacaggcatcaatacaatcaaacttttcatcctctttttgctggatgcctatactttcttcagcgaaaaaagataaatgactggataaaaagagagaggccactgaccgaccaaccccaaccacatgcaacacacacttcgcatttgcatccatccctcgctcggttatgaaattttttaaaccccttccgatcctaaataaaacggaaatcaaccccacaaaacccctgcgtaaagagacccaattgctatctcctccagcatccacccaacggatccgcggcaaccgaccacccatgggatcgctccggggcgcggcagcctcctccgcggcgccgcgcgcgggcgacctggtgaccacgcaggttagccttggtggatttgatgccaccgtcaaggcgctcgatctcgccgacttcctcgagttgaatgcgggctcggtctggcgctgccgcctcaagacctcctggactccgccggacgcctatcccgacttccttctccccaccgtcacctccgccgccgcgccgccgccacagtacgatcgcgtgcctccgcacgccttcgtccactttgcgcgcccggagggcgcgcgcgccgccgccgacgcagcgggccgatccgagctcatcctctccggcaaacccctgcgcgccgcctccgcacaggacagctcccttcgggcatcccgccgccgtagtgtctcgccattccgcttccctggctcgcgcctcgaggtcggggatctcccggcctcggacgccttcatcgccgcctggcgcggcccggcctctgggctcgagttctccgtcgacccgttcgacgggtcttgccacttcatcttcgcccgcgacaccgctttcaaagtccgggagttccgcgagtctgtggtgatgcgctgcgacgtcaagctccagttccccgtccgcgatgttgcggaagtcagggtgttccggctcgactgctcgctgctgatccggctatcggccgcaccgctggtctgttaccgcacggcggatgacgacatccacgtgtccgtgccgttcgacctgctcgacgacgatgacccgtggatacggaccacggacatcactccaagtggtgcgattgggcggtgcggtgcgtatagaatcacattctcgccgcggttctggccaaagatggaacgcgcgctgacgtacatgagggataggagggtggcgatccttgattgcgttggagggtggggggccaggagggggctcaccgtgcgtgatgagcctgagtttggggagcggatgcaggacctgttcttctgcgtgcagcacgccgagggtctcaagtttccggtgttgttcctcgtgaatgctctggtgcacaagggagtaataagtcaacaccacctcacgcctgaattcttcggtttgctccagaggaaggaggatgatgtgaatgtggctgccttgagggaattttggggggacaaatttccagtttttgatgcatgtgggaggctgaagaatctgcaggatagggttgccaggtacctgaaacatcttcgcaacaagattggggatgtcaattctgaggtgaggaggctggtaatcacgcccaccaaggcttattgcatgccaccagaagtggagcgctctaatcgcgtcatccggcattatagtgaagtctcagaccggtttctgagggttacttttatggatgagagaatgcagatgctcaacagtaatgtgctgaatttctctgctgcacaaatcgtcaaagatttgatgtcaaactcgttcctgcataagacaacagtgtacaagcgtgttaaaacgtttttgacagagggattccacatgtgtggcaggaagtactcgtttcttgcattctcatctaaccagctgagggacaggtcagcatggttcttcgcagaggacagaacgacaacagtggaaaccattaggaaatggatggggcggttcacaagtaagaatgtagcaaagcatgccgctcggatggggcagtgcttctcctctacatatgctacggtggtgctgcagccgcatgaggtaaatgagtgtcttgatgaagttgaacataacgggtacattttctctgatggaattggcaagattacgtgcgaccttgcactcgaagttgctcagaagctgcaattgacagataatcccccatctgcttaccagattaggtatgcaggcttcaagggtgttatatctgtctgggaaggaaaaaatgatgggatacgactttccctgaggccgagcatgcacaagtttgagtctaaccatactgtgttagaggtggtctcgtggacaaagtttcagccaggattcttaaatcgtcagattattacattactgtcctccttgaatgtcccggatgctatctttgctcaaatgcaggaagccatgttatctaatctcaacaatattttgtcagactctgatgttgcttttgacattgtaaccgcctcttgtgctgagcaaggaaccactgcagcactgatgttgagtgctggcatttcacctggaactgagccacacctgaaagcaatgctgttagctataaggtcctcacagctgctaggtcttttggagaagacaaggatttttgtgcccaagggaaggtggttgatgggctgccttgatgaacttgggatccttgagcaagggcagtgctttatccgggcatcatctccatcactcaataattgtctggtgaagtatggatcaagattgtctgcagcaaacacaaatgcagagaccattctgggtactatcgtaatggcaaagaatccatgccttcatccaggggatgtccgaatccttgaagctgttgatgtgcctgaactgcatcaccttgttgattgcttggtcttccccaagaaaggtgagaggccgcacgcgaatgaagcatctgggagtgatcttgatggggatctatacttcgtaacatgggatgaaaaccttataccacctggtaaaaagagttggaaccctatggactactccccagctgaagcaaaacaactgccacgcgcagtatcccaacatgtgagtccaactattcttggaatttcttcccttgaaagttcaatatatgtatgcattccctcaaacattagtttaatgttatgatgccatcccattactaaattctgcttgacagttagtgtttttactgagcaaactctgctgtagctaatattgaagttgagcatatagttccatggaatttgtatcataggttcaactctgaatcagggattgtatttcttcctagttcctactaattccatacctgttaattaacttaattggcatgtcacatgtgaaatcctatagttttggactatgtctttatatggttatatcgtcttctactccctccagtctggtttctaa

SEQ ID NO: 697 - DNA, 39810 bp, Zea mays
  source 1..39810: mol_type = other DNA
taaagcgctagcaggtagctaaccatagtaacccaaaaggtaaatcaaagacagggtaaatagaaagctagtaaatccttaggttgttcatagtatgcgggacaatgtattataaagtaaatgggacataatgggtcagaggacacttgccttcaccaaaacatatgctcagggtcttcaacttcgtggaacccaaagagctagatcacttggtcgccgaagcttgaccgtcgattcctcgaagttcggaaacgaatcgcgatccaatcgcaacgcgaagcgaagacaaacagacacaagcaaacaaacatatatatgcataagaacattacaccatacaagataaaatgttataaaagcgagcaatataaaatagagagcgcttctacggttacgcgagaaaaagaaccatgatagacgaagctatggtcgaggggttagcacgtttacgttaaacaagtactaattagaacatctaattcaacataattatattaattgatattaatcaaatataaattaatactactacttagttttgactaacttactattttaatagttgacagttaagcaagtaacttaatgaatatgagcgattctaagcgagacgaattaaggacgcacgacgtgcaaacacgatgtgcgcaacgcgcggacacaaacgacttagtgcgcggacaacgcgcgatacgcgcgaacggcacgcggcaaggcgcgtgacacacgcgaacggcacacgacaacgcgtgcgaacgacacgcgcgacactcgcgaacgacacgcgacaacacgcacggaccgacctgcgaaactaataaataaacaacgtgattaaactaaataattattaataaataacatttcagttaaggttaatcatattgatgactaattataaatgcgcaaatcgaaatcctaaattaggtttttaaattgaaacgtcgttctagtagccactggttaaacaaacgtctaactaaattaaataaaatgtacaaaaattgggataaatatatctaaattaagataattttaatacgaatctaacgcaacttgaatggatcgaatcgggtttaaaacgcaaaagttataaatgttttaaatcatactgtaattcgcgcggactaaatttacgagactgccatcgtcttcttcctctcctcatcttcttcctcccatccatggaagagagaggaggggaagggggctgcgcaggggaggacgagaccgggccggccgggggcgggcgcggccgcacctggcgcgcggggcgcggccacagccgctggggaggggtgcgcgcgggcgcgggagcacgggacgcgggcgccaccgccggccaccgccgccgccgccggggagggagaaaggggcgccgtcgaggaggggaaaacggaggggggaggggcgccgccaccggggaaggtgaggggagagtgggagaggctctgcaccggacgggaaaacgaagaaaccgaagaaaccctaggtgcaacaatggaggtttctcaccggggaagaagaccctcgccggagccgaggagaaatccgtcgattgccggagatttggggatccaatcgatgaaccgaacgcgctgcgacgaagccttcgacgagacgaacgcagcggtaccctcggattccgcagacgatgcacggattgggagtaattgctcgctggagttagaaccgcctcgaacttcagcgagcaataccgggagctagggattggatttgggggaaacgtttggtgttctggaacgggctcgacgagatgaagccggacatgtatatatacctagggtttggacgagataaaaattcagttaaaattcggattttactatttttaaaattcgaaaaagcctagaaatccatattttgtgctcaaaatattatagatactttcaaaaattccagaaaaattcctataaatgttttgggacctaatgaactcaaaaaacataattagaatttctaaaaacatttttaagttccacaaataaatagattttggtttccggaaaatagaaaaatattccgaaaaatatgaaaatttaccgagcgcttctataagatatgttaacatgtttcaaacacattttgcacttagaaacaccatgcaacggcatgaatgcaacaaccaaagtgcctctagggctcattccactaggtttacgctaatataaaacaaaatgattctccatttttagggaaaagagaaaggaaagcgaagaactgagagagtaacaccagaatttggtggatattagaaaagaaattttataccctcaaattcagggtgttacaaaaggagacttccaggagttccaagactacgacgagttctaggtgtgggttagcggcaacccccagtcggctgcctgtgaaggccgcggttatctacgtttcttttccgcactttgatttattgtaagaactatatggacgtctcagacgtatgatgtaatcaactattattcccttttaatactattttgagcactgtgtgatgatgtccatgttatgtaactgctgtgtacgtgaataactgatcctgacacgtacatggttcgcattcggtttgccttctaaaaccgggtgtgacataagtggtatcaaagtcgtgctgactgtaggaccgctaacctagagtagaatggtcgttctaaggactatagacctttgtcccctccttgactttgatatcccttcaaaagttggtcataccgaccaaacctatgttctactatatattataccttgctgaaaatcatgttttattctaatccttcatttacttatgattcatttttgctggtcatattaattctgttctcacccttttgcttgcgatgtcttttatagatggctcgacttagacacactgcacgaaagtccgtcatccccttcttaccctcccgccttgctgagcgtccgcttcgccgtcccgtggccggacagtccagccacttggagagactgcaccaccgcctgcatgaggagcaggaacgtcgacgacaggagcaggagcagcagggctcttccttctcgctccaccaggagatagagtctgtgaggagctgctcccctgtgcttcctctggaggcgccccctgcaccaccactgggcgtcccagcttctggagtagctgctggaggagatccagacgacggagatggcgacgacagctcgagccacgacaccgacttctctgctaaccatgagctggaaggatggtttgctcgatccatcactcgcgacgctgctcgcgggtgccacttccacgatgcgctcgataccctgctacatcgggcacttaaccggcatacttggtccatcgagtatcgctgtgtggtctaccagcactatcgcggggtctacccagaccgctgggaggcaacttgcttggtgcgccgtccggagaacagtctccagggtgcagaggcctgctcagagcactattctatctctgagcgggactcagctgaggcagccatgcaagatgctgcacgacgtgcgctttcgcactactgctcggttttcggtggggtagctgacggtcttgacctgaggtattacccccgccgttcatctggcagcacaggaggcgtgattgtctcacctgtccgtgagggcaatcctaggttgagcagcacagtcaacctagccgccgtgctaaacacggagctggaccatgcattggacgagctgagtagggctcgtgctgagatcgcccagctgcgggctgagcgcgcggaacgtcgtcacctggaggatggttcccccgctcccgtcgggactcagcacctgtaccgttcacctcggcgtggatcccagtcttatggcaatcccgactgcaagaccaagataactctagaaccatagatcgttagagttggatcttgtaattaatacaaaatatatacatagaagcttcagtcttagcgttagtctcagttttagttagtcttagttagacatggtagtttgctatatcctgtgcatttatgtttgtcatgatgaactatgtttggtttggatctttgtaatgattgtcaccagagtgtgggtatcccctgcattttggtttacctattatgataatggagttagttatatagttgggaaaccttttattccactttcctctttatctgagaagctgtgtggtctgtgttggagatcagtgaagatgctcatctgttcagtgctgttgaagaatcctctactcttttcttatgctgcaagatttgtcagatcagttctgatgtgtggttgcattctgcagatgtcagagaacaggcgcagaggaggaaggcgtgctcagcaggagcgagccgctcaacaggatgaggtgccccagcagcagcacctgccgcccccgcccccgatgtccatcgagcagatgtttctgatgcagactcaggcagttcaagccatcggtcagactttggccgccattcagcagcagcagcagcaacagcagcaggccccacctcagcctcagatgcctcagatgcccagagacaagcgtgctgaatttatgagaggtcatccaccaacgttcgctcattcttctgaccccatggatgctgaagactggctgcgcactgtggagcgggagttgcataccgctcagtgcgatgacagggagaaagtcttgtatggtccccgtcagttgagaggagcagcccaatcatggtgggagtcttacctcgccacccatgcccaccctgacgccatcacttgggaagagttcagaggtagctttcgtcagtaccatgtccctgcaggtctgatgacagtgaagaaggaggagttcctggctctcaagcaagggccgttgtctgtcagtgagtatcgagacaggtttctgcaattgtctcgctatgctcctgaagatgtcaacactgacgccaagcgacagtaccgtttcctgagaggcttgattgaccctcttcagtatcagctgatgaatcacaccttcccaacattccagcacctgattgacagagcaatcatgacagagaggaagcgtaaggagatggaggatcgtaagcgcaagatcagtggaccccagcctggaagcagtaatcgtcctcgtttctcaggcaatcaacctcagcagttcaggcagaaccagcgtccacctcagcagcatcagcagttccaaaggcagtatcctcagcatcagtaccagaaccgtcagagcaatcagtcaggaggtcagtttcagaagcagaatcagcaggcacctcgtcttcctgccccagcaaaccagcagagcagtcaggcagcaccagctcaggttgggaacagggcatgtttccactgtggagagcaaggccactgggtgatgcaatgtccgaagaaggcagcctagcagcagtcaggccccaatgccccagccaagcagaatgtgtctcagcctggagcaggcaatcgctctcagccgcgctataatcatggaaggctgaatcacttggaggccgaagcagttcaggagacccccggcatgatagtaggtatgttcccagtcgactcccatattgcagaagtgttatttgatactggagcaacgcattctttcattactgcatcatgggtagaagcacataatcttccaattactaccatgtcaacccccattcaaattgactcagccggtggtagaattcgagccgatagcatttgtttgaatataagtgtggaaataaaggggatagcgtttcccgccaaccttatagtaatgggtactcagggaatagatgtcatcctagggatgaattggctagataagtatcaggcagatatcagttgtgataaaaggacaatcaagttggtgtctccactaggagaggaagtggtgaccgagttagtcccgcctgagccaaagaaaggaagttgttatcagatagccgttgatagcagtgaagcaggcccaattgagagtatcaaggttgtgtctgagttcccagatgtgtttccaaaggacttaccaggtatgccaccagagcggaaagttgagtttgccatagagcttcttcctggaaccgcccctatctctaacagagcttacagaatatctggaccagagttggttgagcttaagaagcaaattgatgagctgtcagagaaaggttacgtccggccaagcacctcgccttgggccgctcctgtcttgtttgtggaaaagaaagatggcaccaaaaggatgtgtatcgattaccgagctttgaatgaagtcacgatcaagaacaagtatcccttgcccagaatagaagatctgttcgaccagttgagaggagccagtgtgttctccaagattgatctgaggtcaggttatcatcagctcaggatccgaccttcggacattccgaagatggcattcatcaccaagtatggtttgtatgagttcacagtgatgtcttttggtttgaccaatgcgccagcgttcttcatgaacttgatgaacagtgtattcatggattatcttgataagtttgtggtggtattcattgatgacattctgatttattctcaaagcgaagaagagcatgcagatcatttgaggatggtattgcagagattgcgagagcaccagttgtatgcaaatttgagcaagtgtgagttctggatcaatgaagtcctgttcttgggtcatataatcaacaaagaaggtttggctgtggatccgaagaaagtggcagacattctgaactggaaagcgccaacagatgctcgaggaatcaagagtttcattggaatggccggatattatcggcgattcattgaagggttttcgaagattgcgaaacctatgacagcgttgctaggcaacaaggttgagttcaagtggaccagaaatgccaagaggcctttgaagcgctgaaagagaagttgactacagcgcctgtcctagtcttgcctgatgtgcacaagcccttctcggtgtattgtgatgcttgctacacaggtttgggatgtgtgttgatgcaagagggaagagttgtggcttactcgtcccgacagctgaaggttcatgagaagaattacccaatccatgatctagagttggcatcagtggttcacgcactgaagacatggaggcactatctgtatggacagaaatgcgatgtttacacagatcacaagagtctgaagtacatattcactcagtcagagttgaacatgaggcaacgaagatggttagagttgatcaaagactatgagttggagattcattaccatccaggcaaagcaaacgtagtggcagatgctttgagcagaaagagtcaagtcaatctgatggtcgctcgtccgatgccttatgagttggccaaggagttcgacaggttgagtctcggatttctgaacaattcgcgaggagtcacagttgagttggaacctaccctggagcgcgaaattaaagaagcgcagaagaatgatgagaagatcagtgagatccggcgactgattctagatggcagaggcaaagattttcgagaagatgcagaaggtgtgatatggttcaaagaccgtttgtgtgttcccaatgtccagtccattcgggagttgattctcaaggaagctcatgagacagcttattcaattcaccctggcagtgagaagatgtatcaggatctgaaaaagaaattctggtggtacggaatgaagagggaaatcgcagagcatgtggctatgtgcgatagttgtcgaagaattaaggcagagcaccagagacctgctggattgttgcaaccgttgcagatccctcagtggaaatgggacgaaatcggtatggatttcatagtcggattgcctcgcactcgagccggctacgattccatttgggtagtagtggaccgcttgaccaagtcagcccacttcataccagtcaagaccaactatagcagtgccgtattggcagagttgtatatgtctcggatcgtttgtcttcatggtgtgccaaagaagatagtatcagatagaggaacgcagttcacctctcatttctggcagcagttgcatgaagccttgggcacgcatctgaatttcagttcagcttatcacccgcagacagatggccagaccgaaaggaccaaccaaattcttgaagacatgttgagagcttgtgcgttgcaagatcagtccggatgggataagcgattgccctatgcagagttttcctataacaacagttaccagaccagtttgaagatgtcaccatttcaggcgctctatggaaggagttgtagaactccgttgcaatgggatcagcctggagaaaagcaggtgtttgggccagacattttgcttgaagccaaagagaacatcaagatggtccgagagaatctgaagatagcgcaatcgaggcagcgaagctatgcagacacaagaagaagagagctgagttttgaagtcggagactttgtctatctgaaagtgtcaccgatcagaggagtcagaagattcggagtgaaaggcaagttagcaccccgctacattggtccgtatcagattcttgcaagacgtggagaagtggcctatcagctcagtttgccagagaatttgtctgctgtgcatgatgtctttcatgtgtctcagttgaagaagtgcttgcgtgtgccagaagagcagttgccagtggaaggtcttgaagtccaggaggacttgacctacgttgagaagccagtgcaaatccttgaggttgcagacagagtcacccgaaggaagaccatcaggatgtgcaaggtcagatggaatcgccactcagaggaagaagcaacctgggagcgtgaagatgatctgatggctaaataccctgagctctttgctggccaaccctgaatctcgagggcgggattcttttaagggggataggtttgtaacgccctgaatttgggggtagaattttttcttcttttctctcaccaaattcaggcgttactcttttcttttctcgttctctcgctaagccttgaccttttccgaagttttagcggggttcggcttggaattcccgtgttaagaaaaaccctaaattactttatgttgtttgatgcaccatgccgaactatgcattctttgattgcttaggaatgtaagtgcattcatctaagaagatcagatttcgaaaagacgaaaaaccttttctttctttttctttttctttctctccctcctccttttctctcccccgcgccgtgggccgccccggccggcccagtcgcccccgcccgtgcccccttttgggcccagttggcccagccgcccctccctcttttccccaaaacccctccctctcccnnnnnnnnnnnnnnnnnnnnnnnnnnnnnnnnnnnnnnnnnnnnnnnnnnnnnnnnnnnnnnnnnnnnnnnnnnnnnnnnnnnnnnnnnnnnnnnnnnnngcaatactagcagccaagaaaaaaaatagtaaaaaaaactcataaccaacacgataacaagccatccaagtccaaccaacagcatccccatcacgaacgtcggcggactgccggacgccgtccgccgggacacaacttagccgaggagtggccgacgggcccggcgacgcgggcgatcctgaccggcttcgacgccggcctctcggcgcgtggcctcgccgacgagttggagcgcttggcaggcaccgtctggcgctgcaggatcaagacttccgtcacgccgcccgagtcctacccggacttccagctctcagtccacgccgccgccgccgccgccgtgttccaccaggacgagccgccgcgggacggtcgcgtggcccctcatgccttcgtccacttcgagcaccgcaatgccgcggaccgcgctggcgacttcttcacgacgcgcatcctcgcgcagagcagacacatgctacatggccatgcggcgcgccggcgggatggtgtcaccgacgccgccaaaccgatgctcttccccaactcgtgcatcgagatcggcgacgtcgtggcgccggacaccttcctcgtcgcgtggcgcgggaccgacgacagcgcctcggcgctcgacttcgtggtggacccgtctggcggcagctgccggctgctgttcgcccgctacaccgccttcacgtgccccgacaggcgccggcccgcggcgctgctgtgctgcgacgtgaagctcgagttcgcgctcgcccacgtcgccgaggccctggcgttccaggccgacgactcgctggtcctccggctctccgccgcgcccctcgtgtactaccgcacgtcgggcgacgacgtccacggccgcgtgcccttccaactcgtcgacgccgacgacgacccgtggatacggaccaccgacgtgacccggagcggcgccatcggccggtgcttggcgtacagggtctccttcgcggtgcagttctggccgacgatgagggtcgcgctggagtgcatgcagaggcagggggtccccgtccacgtacgcgacagacggtgccggggcttcaccgtgctcgaggaggcaggcttggtgcagccgatgcgggacgcgttcttctccccgcggcacgacgacgacgcaggggcagggctacggttcccggtgctgtacttggtcaacgtgctgatgcacaacggggtagtcaatccgcaccagatgacaccggagttcttcggtttgctgatgaggacacgcgaagatgtgaacgttgctgcgctgacggaactgttcggtgcaaagcttggagtctgtgataatccatgctggaggttgaagaacgcgcaggacagggctgccaagaatctcgatcttgtctgtcgcagcagaagaagaaaggctagtgattgcgatgctgaggtgcgaaggctgatcgtcactccaagtctccaaccagggaatactgtatgccggtggagcgctccaaccgcgtcatccggcattaccacgagctgtcagatcgcttcttgagggttacttttacggacgagggtatgctgccgctgaaccctaacgcgctgaccctccgtgcggtgccctcgacgtcgacgcccagcacatcccggcagatgacaagcgtctacaggcgtgtccagacggccctgacggaggggctcatcatgtgtggcaggaggtactcgttcctcgcgttctcagccagccagctgaagcagaagtcggcctggttcttcgcggaggacggagcgacaacggtggcaggcataaaggagtggatggggcagttcccgatcaggaaccccgcgaagcacgccgctcggatggggctgtgcttcacgtcttcctacgcgacggtgacgatgcagcccggcgaggtggacgaggacctcgaggacgttacgcgcaacgggtacaacttctccgacgggatcggggtgatcacggaggacctcgcgctggaggtcgccgagatgctgccgctggcggacaggttcgccccgtccgcgtaccagatcaggtacgcggggttcaagggcgtcgtggctgtctggccgccggggccgggacaagaagaccgtgggacgcggaggatgtcgcttcggcccagcatgaggaagttccagtccacgcacaccgtgctggaagtggtgtcctggaccaagttccaaccagcgttcttgaaccgccagatcataacgctgctcaccacccaaggcggactcgacgccggcccgcactgccccnnnnnnnnnnnnnnnnnnnnnnnnnnnnnnnnnnnnnnnnnnnnnnnnnnnnnnnnnnnnnnnnnnnnnnnnnnnnnnnnnnnnnnnnnnnnnnnnnnnnctactgcctttccgaacagttccgatggtaaccgtagcctcaacagaagaggactgcggcccaagccgcgaaatgtttccacggacgatctagggggtacctccgaaggcatccatctcggcatgcccgaaaggacggtgatctccctaggacggtgcctcgcgttgacatcccacgggagctagctgtggttccccgttcaggcagggggacatgacccacagctcgagcaagtccgcggggtgcaggccatgctcgacgagggagcaggagcacttgagccgatccgccgggacgtcgggcaggcatgggcgggcccaacccccggccggagaaatacgtcatctaccccagggctttcagcaccgcatcgccgacgatgtcagggtcaggccgccacccgcatccagtggggtcggctagaacctggctgcagcagcaatgctcctccgcgcgatgccggagccatcaaccaccgagggacggcgaatccagggagagctcaagaatctcctggaaggcgtcgcggtccgacgggccgagagcaccatcaccgcgaccgtcgggcccacctcgacgagagggtgcgtcggggctaccaccccaggcgtgggggacgcaacgacagtggggaggatcggagtccttcgcccgaaccacccggtccgcaggccttcagccgggccatacgacgggcgccgttcccgacccggttccgacccccgactactatcacaaagtactcgggggagacgagaccggatttgtggctcgcggactaccgtctggcctgccaactgggtggaacggacgatgacaacctcatcatccgcaacctccccctgttcctctccgacaccgctcgcgcctggttggagcacctgcctccggggaagatctccaactgggacgacctagtccaagctttcgccagcaatttccagggcacgtacgtgcgccccgggaattcctgggacctccgaagctgccgacagcagccgggagagtctctccgggactacatccgacgattctcgaagcagcgcaccgagctgcccaacattaccgactcggatgtcatcggcgcgttcctcgctggcaccacctgccgcgacctggtgagcaagctgggtcgcaagacccccaccagggcgagcgagctgatggacatcgccaccaagttcgcctccggccaggaggcggtcgaggctatcttccgaaaggacaagcaaccccagggccgcccatcggaagatgcccctgaggcgtcgactcagcgcggcgccaagaagaagggcaagaagaagtcgcaagcgaaacgcgacgccgccgccgcggaccttgtcgccgccgccgagtacaagaaccctcggaaaccccccggaggtgccaacctcttcgacaagatgctcaaggagccgtgcccctatcaccaggggcccgtcaagcacacccttgaggagtgtgtcatgcttcggtgccacttccacagggccgggctacccgcggagggtggcagggcccacgacgacgacaagaaggaagatcactaggcaggagagttctccgaggtccgcgactgctttatgatctacggtgggcaagcggcgaacgcctcggctcggcaccgcaagcaagagcgccgggaggtctgttcggtgaaggtggcggcgccagtctacctagactggtccgacaagcccatcaccttcgaccgagctgaccaccccgaccatgtgccgagcccggggaaatacccgctcgtcgtcgaccccgtcatcggcgacgtcaggctcaccaaggtcctcatggacggaggcagcagcctcaacatcatctacgccgagaccctcgggctcctgcatgtcgatctgtcctcggtccgggcaggcgctgcgccctttcatgggatcattcccgggaagcgcgtccagcctctcggacaactcgaccttcccgtctgcttcggaacaccctccaacttccgaagggagaccctgacgttcgaggtggtcgggttccgaggaacctaccacgcggtactggggaggccatgctacgcgaagttcatggccgtccccaactacacctacctgaagctcaagatgtcgggccccaacagggtcatcaccgtcggccccacgtacaaacacgcgttcgaatgcgacgtggagtgcgtggagtacgccgaggccctcgccgagtccgaggccctcatcgccgacctggagagcctctctaaggaggtgccagatgtgaagcgccatgccggcaactttgagccagcggagacggttaaggccgtcaccctcgacctcagcggcgatgcctccaagcagatccagatcggctccgggctcaatcccaaataggaagcagtgctcgtcgactttctccgcgcgaacgccgacgtcctcgcgcgaagtccctcggacattcccggcataccgagggatgccgccgggcactcgctggacatccgagccggagcccgacccgtcaagcagcctctgcgccgatctgacgaggagaagcgcagacccttaggcgaggagatccgcaagctaatggcggcagggtcatcaaagagacgaatctctagaatcgannnnnnnnnnnnnnnnnnnnnnnnnnnnnnnnnnnnnnnnnnnnnnnnnnnnnnnnnnnnnnnnnnnnnnnnnnnnnnnnnnnnnnnnnnnnnnnnnnnnccgccccccctgttttttttatttttttattttattttattttatttcagtttatgtcctattatttattttattttaggcaggttaatcattgttcatgttattgaaataggaaacttaatttagaattccgttacgctagttaattcatataatcaattgtttatccagttcaatgttgatcaactaaaaatgactaggtttccattagtgcatataactaaattcttttgttagaaccaattgtaactaatcgttagtgcataagctttaacccctgcgagactttttcccgtttctttctaaccataatgaatgcgatatcgaatgtcatacttgatgcatattcactttatttgttcccttgtatgatgtactgtttgtttcccaatttgaatggatgaatgtatgtatgcttgcaatcgcatagagaacgatccggtcgaagagcccgaggaactcgcaggagaagcccctgagcagcagtcggttggtggaggcaagtgtcctttgacctatctctgtcctattcattctttaattcacctcccgctttacacatttatacctaaggattgactagcttttgttatccatgtccttgattacctatttgggttggattattattacctagctttatgctattgcttaactctaattaatgaacatgatgagattatctatgatacgctgttttcccttctcttattatgatgttgtacttgtgatcttcaagggggctcgagcggtttctcgagtgcctctccgtaaggacctgttctatggatgaccgcccgggaaaacagtgcaaccatgagggtagaatggggtgcccttagctgaataattagaggatccgggatgtagttcacttagctgtcgtgccgtcaatggggctcggtgtatgcggctcgctctgccaaggttgatttgtcccttggggaggagtgcggtacatttaggaaacctaacgggtggctacagccccggggaatctttgtaaaggctacgtagtgatgccctgctaggccacctaggtagtggtcaatggggagtagctctctccgggcagaaagggaatcacgacttgtgggtaaagtgcacaacctctgcagagtgtttgaaaactgatatattagccgtgctcgcggttatgagcggccaagggagctccagtgattagtggtacttgatcagagacattgtggtacaggtggctatgagatcgatggtttggttatggctatggtgctggtaagtggtattctttccgtttggaaagggtacatcgggttaataacttgggtaatgctaaaacttggctttctactagtaagtaataatctgaccaactaaaagcaactgcttgacttatccccacataaagctagtccactacagccaaacatgatacttgctgagtatgttgatgtgtactcacccttgctctacacaccaaacccccccaggttgtcagcattgcaaccactgctcaggcgaagatgaagctgtggaaggagacttccaggagttccaagactacgacgagttctaggtgtgggttagcggcaacccccagtcggctgcctgtgaaggccgcggttatctacgtttcttttccgcactttgatttattgtaagaactatatggacgtctcagacgtatgatgtaatcaactattattcccttttaatactattttgagcactgtgtgatgatgtccatgttatgtaactgctgtgtacgtgaataactgatcctggcacgtacatggttcgcattcggtttgccttctaaaaccgggtgtgacatacaacctctctagagtgtaaaactggtatactatccgagctcacggtcatgagcagcttaggactctcgcatgattaaattatggaactaaaattcaatttgtcatatacattgcatgggattatttattaattttgttttattattcttattatggtttgatatttacttacatttagtaacttctaataaaatttgaccaatttaataaaagcaatgcttagctttaacccctattgttgatcagtcttacacatcacatgaactcccacctttggtgagtttatgcacattattccccacaacttattgagagatgaacatgtgtgagctcacccttgctgtctcacacccccacgggagaagaacatgtggttcaagaggagccacacaacgaggagtttgacttgatctaggtgacgtctcccagttgactttatggcgccaaggatggactttagtgcattttatatttattttttattttgtaagacttccgcaatgtaataagtactctaatgttattgtgacatttatctctatacactctgttattatatgtgttgtcttctttggcgcctatatgagatgcacccggctttgtcccttaaatccggttgtgacatgctgggcaaatcctgatgaaaagacctggtgttttggtgcctgaggacattgttgctgacattcttgttgtgaccgctggtgtgaggaaaccttcttcctctgttaatcctgctggtgaggtcccctgcaagaatgctcctccacggtaatttgcgtgatgaagacatactttggataagaaacacttttcattgagttagtatttttatcaagacgttgtatcatagtgttcatgcgtgcgtggccacgctatgttggcttaagccgaatgttctgtcaggagggtgttgagatcgccctcatatatacgagtgtgagcatgctgtattgccctaaggcattcctgacttaagctgattgctttgttagtagggtataatagtcaccctaagtcatgtaagtgtgagcatgtcgcaccgacttaaggcgtttctgacttaagccaattgctccgttagtagggtatagtagtcaccctaagtcgtgtaagcgtgatcatgtcgcaccgacttaaggcgtttctgacttaagtcgattgctccgttggtagggtatagtagtcaccctaagtcatgtaagcgtgagcatgtcacaccgacttaaagcatttccgacttaagtcgattgctccgttggtaggatatagtgatcaccctgagtcatgtaagcgtgagcatgtcgcactgatttaaggcgtttctgacttaagtcgattgctcagttggtagggtatagtagtcatcctaagtcatgtaagcgtgagcatgtcgcactgacttaaggcgtttccgacttaagtcgatttctccgttagtggggtatagtgaccaccttgtgtcatgtaagtgtgaaggtatgttgcgtcggttttaagtcgtatccgactcagaccagttgttgatctaaaatttgtatgcagtagaacatagaagctttattgataatgagaccttttgcttacaaagtacaacttgtccaccagagttttgaggtactgctatggatagaatttcctgaggtgctcaatgttccatgaaatcttcacttcggtgccatccatttgggtgagtcggtaggatcctgatcgggtaacttctgcaacgatgtatggtccttcccatgggggtgacagtttgtgccgtccttctcccgttagtactcggtggaggagtaggtctcccattgcgaaggatcgatgtcacactgctttgtcgtggtagcgcctcaaggtttgctggtatctggttgactgaatgaccacattcagccattcttcatctaatatatcaatgtcttccagccgggttgcttatgccttagctatgtttttgaatgttagcctaggcgctccaaagatcaaatctactggtagtattgcctctgatccatataccatgaagaatggggtgtttccatgtaaagcccagcttgactgtgttcgcaggctccagaccacgtacggtagttctctgatccattttcctgtaagcttttcgctcttgtcgaacaccttcttcctgagtgctccaagtatcattctgttggctctttccacctgcccattagctcttgggtgtgccactgatgcatacttgatctggatgctcctttgctcacaaaaatcaaagaactatgagctagtgaagttagatctcaggtctgtgatgatgctgtaaggtgtcccgaaaatctgaacattatttcctgaatgaattccaccgcctttgctgaggtcaaagaggcaacaagcttgtattctatccattttgtgaatttatcaatggcgaccagtatgtgagtgtatcccccttgagcttttttgaagggccgatcatgtccagcccgcagcatgcgaaaggccaggtcacaggaatagtctgcaactattgggctggtaagggttgctgctttgataagaattggcatacttcgcacttctgaaccaactttgctgcatcattcttcgttgttggccagtagaacccagacctgaaagttttccctactaatgtccttgatgctgcatgcacgccacattgccccgcatagatttcatccagcagctgccttccagtagtcgagtgaacacacttcatgaggactccttctgcccctcttctatatagtagaccccctatgatgatatagtgggccgactgtcccgcgatgcgttctgttgtggctttatcatctgtttcttccttgttttttatgtatctgataattagttccctccagtcgttgggatctgcttctgtctgacccagaacgtggcactcctcaacctgctcggtggtgacgcttggctgttgtatctcttggacgaaaaccccaggtggaacttgggcccgactagaccccagctttgacgcttggctgctgtatctcttgatgcgttgcgacccctttctacatgatggaattctaaaccctcgaatttgtcctccaccttccgtactgctgcgtagtatctattcattgagtcgattgagcagtcccagtctttgtttacctggctgatgaccaccagtgaatcgccgtataccattaatcttttgatgccgagtgagatggcgatgctcagcccatgaaccagggcctcgtactctgcagcattgttggacgctggaaacaggagctgaagcgcatacttgagttgatcacctccaggagcgaggaaaagaatccctgccccggctccctgcaatcttagcgagccatcaaagtacatttttcagacttcagcagcttctgggtttttcggaacctggtgctcagtctattctgatacgaaatcaactagtgcttgagtctttattgcagtgcgaggccggaattctatatcatgagctccgagttcgcatgcccacttggttgttctcccaacaacttccttgttgtggagtatatctcctattgagaatcctgtgactattatgactatgtggtcgtcaaagtagtgtcgaagcttgcgagcagttagaagttgaaagggaattaggcttacacctagctcctaaataattttggtggttgaattgcccaacacaaatctttggactaactagtttgctatagtgtataagtaatacaggtgccaaaggttcacacttagccaataaaaagaccaagtgttgggttcaacaaaagagcaaaggagcaaccgaaggctcctctggtctggcgcaccggactgtccggtgtgccaccggacagtgtccggtgcaccagaggaattcaactcaactcgtcgccctcgggaaattccagagcccgcgcgctaaaattcaccggactgtccggtgtacaccggacagtgtccggtgctcatttgagacgtggctcaggaactcgccagtctcgggaactcgcgaaggctgctccgctataattcaccggacatgtccggtgtgcaccggactgtccggtgcaacctcggggcaacggctacttcgcgccaacggtcacatgcaggcgcatttaatgcgcgccagaagcgcgcagtcgtcaggcacgcgggagcaggcgcaccggacactctacagtgcatgtccggtgcaccaccggacatcaaggcgggcccagagacagagctccaacggtcgacccaacggctatttggtgacgtggctgtcgcaccggacatgtccggtgtgcaccggactgtccggtgcgccatcgaacaaacagcctcaccaaacggctagtttggtggttggggctataaataccccccaaccacccaccattcatagtatccaagttttccacttctcaaccacttacaagagctaggcattcaattctagacacacgcaaagtgatcaaatcctctccaattccacacaaagccctagtgactagtgagagtgatttgccgtgttcatttgagctcttgcgcttggattgctttctctctttcattctttcttgtgttcaatcctcacttgtaaccgaggcaagagacatcaattgtgtggtggtccttgcggggaggttttgctcccggttgatttgagaagagaaagctcactcggtccgagggaccgtttgagagaggataagggttgaaagagacccggtctttgtggcctcctcaacggggagtaggtttgagagaaccgaacctcggtaaaacaaatccacgtgtctcacttcattattcgcttacgatttgttttgcgccctctctcgcgaacttgattatatttctaacgctaacccggcttgtagttgtgattatttttgagaatttcagtttcgccctattcaccccccctttaggcaactttcaattggtatcaaagcccggtgcttcattagagcctaaccgctcgaagtgatgtcaggagatcacgccaagaaggagatggagaccgtcgaaaagcccactacaagccacgggagcacttcatcggaagagtcccgcaccaagaggaaggagaagaagaagagctcctccaacaaagggaaggagaagaaatcttcttctcaccacaaagagaagaaggagagatcttcctctcacaagccacatcggaatgggggcaagcacaagaggatgaggaaagtggtctactacgagaccgacacttcatcaacatcgacctccggctccgatgcgccctccgtaacttctaaacgccaagagcgtaagaagtttagtaagatccccttacactatcctcgtacatctagacatactccattactttccgttccattaggcaaaccgccaacctttgacggtgaagattatgctaggtggagtgatttaatgaaatttcatctaacctcactccacaaaagtatatggaatgttgttgagtttggagcacaggtaccatccgtaggggatgaggattatgatgaggacgaggtggcccaaatcgagcacttcaactcccaagccacaaccatactcttggcctctctaaatagagaggaatacaacaaggtgcaagggttgaagaatgcaaaggaaatttgggacctcctcaagaccgcgcacgagggtgatgaactaacaaagatcaccaagcgggaaacgatcgagggggagctcggtcgctttcgacttcgccaaggggaagagccacaagacatgtacaaccggctcaagactttggtgaaccaagtgcgcaacctcgggagcaagaagtgggatgaccacgaggtggttaaggttattcttagatcactcattttccttaaccccactcaagttcaattaattcgtggtaatcctagatatactcaaatgaccctcgaggaagttatcgggaattttgtgagctttgaatgtatgatcaagggctccaagaagatcaacgagcttgatgaaccctccacgtccgaagcacaaccggtggcatttaaggcgacgaaggagaagaaggaggagtctacaccgagtagacaaccaattgatgcctccaagctcgacaatgaggaaatggctttaatcatcaaaagctttcaccgaatcctcaagcaacggaaggggaaagactacaaatcccgttccaagaaggtttgctacaagtgtggtaagcccggccactttatcgctaaatgtccattatcaagtgacagtgacagggacaacgacaagaagggcaagataagagaaaagaagaggtaccacaagaagaggggcggcgatgcccacgtgtgccgcgagtgggactccgacgagagctccaccgagtcctcctccgacgaggacgccgccaacatcgccgtcaccaaggggcttctcttccccaacgtcggccacaagtgtcttatggcaaaggacggcaaaaagaagaaggttaaatctaaatcctccacaaaatatgaatcctctagtgatgataatgctagtgatgaggaggataacttgcttaccctttttgccaaccttaacatggagcaaaaagaaaaattgaatgaattaattagtgctattcatgagaaggatgaccttttggattcccaagaggatcttctaattaaagaaaacaagaaacatgttaaggttaaaaatgcttatgctctagaggtagaaaaatgtaacaaactatctagtgagctaagcacttgccatgacactattgccaaccttagaaatgaaaatgctagtttaattgctaaggttgattcgcatgtttgtgatgtttcaattcccaatcctagaaataatgatgataatttgcttgctagaattgaagaattaaacatttctcttgctagccttaaaattgaaaatgaaaaattgcttgctaaggctaaggattttgatgtttgcaaagctactatttctgaccttagaactaaaaatgatttgttacatgctaaggttgttgaattgaaatcttgcaaaccctctacatctaatgttgaacatgttgctatttgtactagatgtagagatattgatgttaatgctattcatgatcacatgtctttagttaaacaacaaaatgatcatatagcaaaactagatgctaaaattgccgagcataacttggaaaatgaaaagtttaaatttgctagaagtatgctctataatgggagaagcccgggcatcaaggatggcattggcttccaaaggggagacaatgtcaaacttaatgcccctcctaaaaatttgtctaactttgttaagggcaaggctcccatgcctcaggataacgagggttacattttgtaccctgccggttatcccgagagcaaaattaggagaattcactctaggaagtctcactctggccctaatcatgcttttatgtataagggtgagacatctagttctaggcaaccaacccgtgctaagttgcctaagaagaaaactcctaatgcatcaaatgatcatgctatttcatttaaaacttttgatgcttcttatgtgcttactaacaaatccggcaaggtagttgccaagtttgttgggggcaaacacaagggctccaagacttgtgtttgggtacccaaagttcttgtttctaatgccaaaggacccaaaaccgtttgggtacctaaagtcaagaactaaaattgttttgtaggtttatgcatccgggggctcaagctggatactcgacagcgggtgcacaaaccatatgacaggggagaaaaagatgttctcctcatatgagaaaaaccaagatccccaacgagctatcacattcggggatggaaatcaaggtttggtcaaaggattgggtaaaattgctatatcacctgaccatactatttccaatgtttttcttgttgattcattagattacaatttgctttccgtatcccaattatgtcaaatgggctacaactgtctatttactgatgtaggtgttactgtctttagaagaagtgatgattcaatagcatttaagggagtgttagagggtcagctatacttggtagattttgatagagctgaactcgacacttgcttggttgctaagactaacttgggttggctctggcaccgccgactagcccatgttggaatgaagaatcttcacaaacttctaaagggagaacacattttaggactaaccaatgttcattttgagaaagacaggatttgtagcgcatgccaagccgggaagcaagttggcactcatcatccacacaagaacatcatgactagtgataggccactggagctcctacacatggatttattcggcccgattgcttacataagcatcggcgggagtaagtactgtctagttattgtggatgattattctcgcttcacttgggtgttctttttgcaggaaaaatctcatacccaagagaccttaaagggattcttgagacgggctcaaaatgagttcggcttaaggatcaagaaaattagaagcgacaacgggacggagttcaagaactcacaaatagaaggcttccttgaggaggagggcatcaagcatgagttctcttctccctacactccacaacaaaatggtgtagtggagaggaagaatcgaactctattggacatggcaagaaccatgcttgatgagtacaagacaccggatcggttttgggccgaagcggtcaacaccgcttgttacgccatcaaccggttataccttcaccgaatcctcaagaagacatcctatgaactcctaactggtaaaaagccaaatatttcatattttagagtttttggtagcaaatgctttattcttgttaaaagaggtagaaaatcaaaatttgctcctaaaactgtagaaggctttttactaggatatgactcaaacacaagggcatatagagtctttaacaagtcctcaggacttgttgaagtttcttgtgacgttgtgtttgatgagactaacggctctcaagtagagcaagttgatcttgatgagataggtgaagaacaggctccatgcatagcgctaaggaacatgtccattggagatgtgtgtcctaaggaatccgaagagcctccaaaagcacaagatcaaccatcctcctccacgcaagcatctccaccgactcaaaatgaggttgaagctcaagttgatgaagtagaagatcaagcaaatgtgccacctcaagatgatggcaatgatcaagggggagatgcaaatgatcaagaaaaggaggatgagcaagaaccaaggccgccacgcccaagagtccaccaagcaatacaacgagatcaccccgtcgacaccatcctcggtgacattcataagggggtaactactagatctcgtgttgcacatttttgtgaacattactcgtttgtttcctccattgagccactcagggtagaggaagcactacaagattcggattgggtggtggcgatgcaagaggagctcaacaacttcactagaaataaggtatggcatttagttccacgtcctaatcaaaatgttgtaggaaccaaatgggttttccgcaacaagcaagatgagcatggtgtggtgacaaggaacaaagcacgacttgtggccaagggatactcccaagtcgaaggtttggatttcagtgaaacctatgcacccgtagctaggcttgagtcaattcgcatattattggcctatgctacttaccatggctttaagctttatcaaatggacgtgaaaagtgccttcctcaacggaccaatcaaggaagaggtctatgttgagcaacctcccggctttgaagacagtgagtaccctaaccatgtttataggctctctaaggcgctttatgggctcaagcaagccccaagagcatggtatgaatgccttagagatttccttattgctaatggcttcaaagtcggcaaagccgatcctactttattcactaaaactcttgacaatgatttgtttgtatgccaaatttatgttgatgatatcatatttgggtctactaacgaatctacatgtgaagaatttagtaggatcatgacacagaaattcgagatgtcaatgatgggggagttgaagtatttcctaggattccaagtcaagcaactccaagagggcaccttcattagccaaacgaagtatactcaagatattctaagcaagtttggaatgaaggatgccaagcccatcaagacacccatgggaaccaatgggcatctcgacctcgacacgggaggtaaatccgtcgatcaaaaggtataccggtcgatgattggttcattgctttatttatgtgcatctcgaccggacattatgctttccgtttgcatgtgtgcaagattccaagccgaccctaaggaatcacaccttacggccgtaaaacgaatcttgagatatttggcttatactcctaagtttgggctttggtaccctcggggatccacttttgatttgattggttattcggatgccgattgggcggggtgtaagattaataggaagagcacatcggggacttgccagttcttgggaagatccttggtgtcatgggcttcaaagaagcaaaattcggtcgctctttctaccgccgaagccgagtatattgccgcaggccattgttgcgcgcaattgctttggatgaggcaaaccctgcgggactacggttacaaactaaccaaagttccccttctatgtgataatgagagtgcaatccgtatggcggataatcccgttgagcatagccgcactaaacacatagccattcggtatcattttcttagggatcaccaacaaaagggggatatcgagatttcatacattaacactaaagatcaattagccgatatctttaccaagccacttgatgaacaatcttttaccagacttaggcatgagcttaatattcttgattctagaaattttttttgctaaacttgcacacatagctcataagtatacctttgatcatgtctcttttatatgctatgactaatgtgttttcaagtgtatttcaaaccaagtcataggtatattgaaagggaattgaaatcttcggcgaagacaaaggcttccactccactctactactcatcctttgccgtcgctccgcatcactctccaactttggtataatcttcactcatttatttcatgaccaaaggaggagaaagtacttcatagggctctaatgattccgtttttggcgattcatgccaaagggggagaaaatatgagcccaaagcaaaaggaccgcaccaccaccctaattttaacattcttaattggatggaaaatttcaaaattggcatctctttgtgttctaaagggggagcaagtagtattttcaaaattgatgtcttaaaaccctcttgaacactaagaggagaatttatttgagggggagttttgtttagtcaaaggaaaagcatttgaaacaagggaagaaaatttcaagcttgaaaatgctttgcaaaatcttattcatttaacctttgactatcttgcaaaaggtttttgaaaagaatttacaaaaggatttgcaaaaacaaaacatgtggtgcaaatgtggtccaatatgttaaaaacaaagaagcaatccatgcacatcgcgtaagtatttatattggctcaattccaagcaacctttgcacttacattatgcaaactagttcaattatgcacttttatatttgctttggtttgtgttggcatcaatcaccaaaaagggggagattgaaagggaattaggcttacacctagctcctaaataattttggtggttgaattgcccaacacaaatctttggactaactagtttgctctagtgtataagtaatacaggtgccaaatgttcacacttagccaataaaaagaccaagtgttgggttcaacaaaagagcaaaggagcaaccgaaggctcctctggtctggcgcaccggactgtccggtgtgccaccggacagtgtccggtgcaccagaggaattcaactcaaactcgtcgccctcgggaaattccagagcccgcgcgctaaaattcactggactgtccggtgtacaccggacagtgtccggtgctcatttgagacgcggctcaggaactcgccagtctcgggaactcgcgaaggctgctccgctataattcaccggacatgtccggtgtgcaccggactgtccggtgcaacctcggggcaacggctacttcgcgccaacggtcacatgcaggcgcatttaatgcgcgccagaagcgcgcagtcgtcaggcacgcgggagcaggcgcaccggacactctacagtgcatgtctggtgcgccaccggacatcaaggcgggcccagagacagagctccaacggtcgacccaacggctatttggtgacgtggctgtcgcaccggacatgtctggtgtgcaccggactgtccggtgcgccatcgaacaaacaacctcaccaaacggctagtttggtggcagccaagcgtcaccaccgagcaggttgaggagtgccacgttctgggtcagacagaagcagatcccaacgactggagggaactaattatcagatacataaaaaacaaggaagaaacagatgataaagccacaacagaacgcatcgcgggacagtcggcccagtatatcatcatagggggtctactatatagaagaggggcagaaggagtcctcatgaagtgtgttcactcgactactggaaggcagctgctggatgagatctatgcggggcaatgtggcgtgcatgcagcatcgagggcattagtagggaaaactttcatgtctgggttctactggccaacaacgaagaatgatgcagcaaagttggttcagaggtgcgaagtatgccaattcttatcaaagcagcaacccttaccagcccaatagttgcagactattcctgtgacctggcctttcgcatgctgcgggctgacatgatcggccctttcaaaaagctcagggggataccactcaccatactggttcgccattgaatatttcaccaaaatggaaagaataacaaagcttgttgcccttcattnnnnnnnnnnnnnnnnnnnnnnnnnnnnnnnnnnnnnnnnnnnnnnnnnnnnnnnnnnnnnnnnnnnnnnnnnnnnnnnnnnnnnnnnnnnnnnnnnnnnagtagttgttaacctacctaaatccatcattagtggtgtatgggaaagtcgcgatcccttggcagatggataacatgaattgtgagtaaagatgagcaacttctgcagagtgtaaaactggtatactagccgtgctcacggtcatgagcagctcggaccctcacatgattaatttatggaactaaattcaatttgtcatatgcattgcatcgcaggtgatgttgttacttttgttctactgcttaattgggttggtatttacttatacttagtaattgctaataaaattttgaccaactttaaaagcaatgctcagctctaaccatcctcccccaaccacccaccattcatagtatccaagttttccacttctcaaccacttacaagagctaggcattcaattctagacacacacaaagtgatcaaatcctctccaattccacacaaagccctagtgactagtgagagtgatttgccgtgttcatttgagctcttgcgcttggattgctttctctctttcattctttcttgtgttcaattctcacttgtaaccgaggcaagagacaccaattgtgtggtggtccttgcggggaggttttgctcccggttgatttgagaagagaaagctcactcggtccgagggaccgtttgagagagggtaagggttaaaagagacccggtctttgtggcctcctcaacggggggtaggtttgagagaaccgaacctcggtaaaacaaatccacgtgtctcacttcattattcgcttacgatttgttttgcgccctctctcgcgaacttgattatatttctaacgctaacccggcttgtagttgtgattatttttgagaatttcagtttcgccctattcaccccccctttaggcgactttcagaagtactgtgtataatagcttctgaacttgagggtaccttatcttcgagggaatgaggacttcactgatgaagtaaaccggatgttgtactggttatgtgcgcccttcttcttcctgcttaactaccaacacagtgcttaccacgtgagtcgtgcaggagatatatagtagcaggtcttcagccgactgattggatgtagcttgacatggcggcttgagcactggcggcgtggtcagaaactttttcagtgcctccaaggcttcttgagcttcggtgatccactagaatttatccacctttttgagcaacttatagaatgacatccctttctcacccagcattgatatgaacctgctcagcgctgccatgcatccagtgagcctctgtactttcttctgtgatcgtggtggctccatcctcataatggcttcaatcttctctggatttgtctctattcctcaatggctgacaataaacccgagtagctttccagccggcacccagaacacacacttttctaggttcagtttccatcgatagcgcctcaagctgttgaagacctgttgcaaatactcgatgaagttgtctgagttttctgtcttgatgactacatcatcaacataggcctctattcgcttgccccagtggtcggctaagcatgtttggatggccctctggtaagtcgctccagcgtttttgaggccaaacggcatggaggtatagcagaaggctccaaattgtgtgatgaatgtagtcttctcctcatcttcctttgccagactgatctgatgatatctggagtagcaatctaggaaggagagcatagagcagccagcggtcgagtcaactacctgatctattctagggagttcgaagggatctttcgaacattgcttattgagatcagtatagtcgacgcacatgaaccaatcaattttattctttttgagtacaagaacaggatttgccagccattcatgatgtagtacttctttaatgaaccctgccgacaccaggcgagctaattccgctcgaatggcttctcttttgtcaggcgtgaaacaatgtagcttttgtcggatccgccttgcctgagggcacactttgagtttgtgcttggccagctctctcaggactcccggcatgtccgcaggttgccatgcgaacacatcccaactgtcttgcaggaactggacgagcgcgctttcctatttgtcgtcgaggctagagctgatgattgcagtcttgcgttcattagagaatctcagattgatccttttagtctccttagtcggccgcatagaggtcgcagccggagcttcattcgaggggatcgtgaaattttcatccaccagcttgccatcggcatatgcgggaagggctaccggggtcccggcagtgagagtcgtccgaatggctccccaaaagcatcacgtggcaccttgcaagtcggcgcgcatgctaataatcctctgaggccatggcatcttgagtatcatgtacgagtagtgtggaatagccatgaattttgtcagtcctggtcttccaatgatggcattgtacccgcaatcgaagcgtgccacctcaaaccttaggaactcagttctgtagttctttgggattccaaaggtgatggacatgtagacgtgtcctagtgggtactctcctttggtcggcacgatgccaaagaaaggagtatccgactcagtggggtcgtcgatggcgacccccagggcctagagtgtctgggggaaggtgacgttgatgctgctgccaccatccactagcaccttcttcactggctttctcggatcacaggatcgatgagtagcggatatttgccggggtgatctaagttaagccactgatcggctcggctaaaggttatcacatgctctaaccatcggtaaggagccggagcactgttcgtggccactaggacctgtcgatcattaagctcttgttgccttctactttcttgtgctccatggccttcgaatatgacattgacctccctgtcaatgcgtgggaaagctcaacccctcccccttcctgccgctgaggctgcctaggatcgccaggctctcctcagggcgggggaggtggtagtggttggaacggtcggccatgcccaacggagtgtttgaaatctctgcagtcccgcagggtgtggcgcatgtctttgtgatacagacactaggagtcgaggatcttgtccagtgttcatactcctccgtggggtgcgccgcgagctcgagcagtaggtggcccgacggtgtgcacctcctcgcggggcctcttttcccagcgtttgtccgattgttggttcatgtcccaccacagcgcgggtggtgcgggttttgcgcctccgatgaggtactgagcccgctcatccatggtgatgtagatgttcgcctccctaaacaattgttcggaggtggttggtgccttttgaagtatggcccggacaaaggccgggttgttggatccccgatagaagtcttcaatcacagcagccttagcgacttcaggaatacgattcctcattgtttgaaatcttttgaggaacgatcggagagtctcatcattctaacgcctactggattataggtcccatggctgcgccggtttatcggagagagaccagaagttcacgataaaccgacgactgaagtcactccagtcatcgatgcagtgttgaggcaggtgtcggagccattgcaacgcgtcctgccctagaacaatgggcaagtacgccgtcatgacgtcctccattgccccagtagcccaagcggcagttgtatagacagccaaccatcctcccgggtcctgcttaggctcatatttgtcgacgttggagaccttgaagttaggaggccattggatggcccggaggcaaggagtaagcgcggaaactccgcacgcatcctcttgccgatgatcgcgccatcggtcccggggaggggagtcggtattaggtcatctcgaccgttcccggaatggactttttgttgaagctgccgttgactcgatccatgttgcacggctgcgcgccggtacaccatgatctcggtcgtactcctcccggcaccttgtttcattctcgcgtcgtcggtcgcgtgaagcgctgatggtgcttcacgcgtctcatcggctgttgatggcgtgacgcaggtcgttcgcaggatgagcgggaggtagaagatgattggccgcctaagtaagctgccgtcgataaccctcctcatctggggttcaggaaggccgtcggctatctgcgccaacactcctccgacttcactcgacgtgttcaatgcccgagcgaagtcagggtataggtttcgagtgagaagaggattctcccgccggagtctagcatcttattcagctagttcctcctctcgttcttgagcttgtcggcgatcacggcgacgggagttgcgtctttctcggtgtacccgttcatcaggagtttctcccacttctgaggctttgtcctgagatacaggtcgcactgggtcccgttctctggcttcatgatgtcactgcacattccgacgcctgtttctccatcgtcgggcatcacgctggggaggttcctccccctacagggtaggttcatcgtcgaagatgggaaatgactccaatctcccctgaatgaagaggacgtcggggtagaaaggagcatgtatggcggtgtgcttattcccattctcttttgagggtggaggtgctaggaggattgctcgctgtgttttccttccccggtatgggatattcgcttccttccttcgagtgatccgtgtccactccttagtgggcgagatggacaacggagttcttcgggcgggagaggcctcgaccggctggccttgcattcttcgggagcctttaagccctgacttgtgtggggccatgccctcttgggcagcgagcggaggcatggctcgcggactcgcttcagcttctcgtggaattcacgaggagggtctcttcttgggtggatctgctatgcggtgcagagttccttctatgtccgctacgcacgggatggttccgaagcagaacattgctcctgggctgagagtgatcttgctcttgaagatgatggccatggagctagcgttgatcaacgacaccccctacctggcgcgccagctgtcggtgtttagtgtccgaccgcacacccgggagtaccctcgtggtgcttttgggtaggacggtgtcacagattgtaacttgatggttcgtgccgtgggcacggggaaaagagagtcgagcgattttctgtaggttcaggccgcttgaggagtgtaataccctacttcttggggtgactttgtatgtgtggggtgtttacaagtggtgtctcccgagtggagaggtgctaatgagatgaaaatgatggggatctccctaggccttatatacacgaccgtagggcactctctgcacacatgctgatcacactcttctagcttatctcctagctaatagcgaccaaactttgcttatcctgaggaaaaccctgcacctccgttccgagctatccccggcgtttgaggaagtcgggcgtgggaaaagcgagcagcttcaacaggatcacacccaagccacgaataatctggacgtgagcccatcgcttttctaggtcggcccatttccaccgttgtctttgcctggcccacaacgcggtggccttgtggggcgactggcttgtggccccaagcagggtttttgccttctagtggacccggaggttatctgtcccgcacataaatggtatggatattatctgtccatattcgaattcgatccacttaagggtttgttcgattaggggtggattgaggggattagagaggattaaatcccttcctattcaattttaaatagaaaagggatttaaatcctctcaatcccctctaatccccacataaccgaacaaggcctaagagggcaaagatctgatccgtattcgagaccagcatcagtatctgattcgtattcaatttatatctatatatttatagttggatatttaatatgtcgacatccattctaatcttatccaacacaactcgataatattcaaatccgtatacaaaatacgaaaacaaatattgcaaaaaacattattcgtccgtatccgatccgattccacatctacctcttttatttaattttgactagcgagagatttaatccccttcgatccggacgcaatcgaacaaacctttaaatgctagtttggaaacataaatctgcttgagttcccctttatttccggggtaataaatctctagaagtgatatttgaataagatatttagttatttgtgacagatttctttacctagatttagcttcccttgctcctaaactagatctaacgtcttgttcagttacatggatattagagccttagagggatggagagatccctatccgtacaagctctaaaataggaagggtttcgtacaacgcatcttcgcgcctcccctgaaagttcggaccctgactcaccagatcaagtccgagtctggttatcgatctgcatcctcagatcaactccgagtctggtgatcgatctgcaccgtatctagtataaatatcggcaagcagttttctccctgcagaagagaggtattcgaggagacgagagtagcgatggcgcgcagccgtactcgcagccccgagtcgactcgtcgtcttgctcatcgccttcgcgctatcaagccatccaagtccaaccaacagcatccccatcacgaacgtcggcggactgccggacgccgtccgccgggacacaacttcgccgaggagtggccgacgggcccggcgacgcgggcgatcctgaccggcttcgacgccggcctctcggcgcgtggcctcgccgacgagttggagcgcttggcaggcaccgtctggcgctgcaggatcaagacttccgtcacgccgcccgagtcctacccggacttccagctctcagtccacgccgccgccgccgccgccgtgttccaccaggacgagccgccgcgggacggtcgcgtggcccctcatgccttcgtccacttcgagcaccgcaatgccgcggaccgcgctggcgacttcttcacgacgcgcatcctcgcgcagagcagacacctgctacatggccatgcggcgcgccggcgggatggtgtcaccgacgccgccaaaccgatgctcttccccgactcgcgcatcgagatcggcgacgtcgtggcgccggacaccttcctcgtcgcgtggcgcgggaccgacgacagcgcctcggcgctcgacttcgtggtcgacccgtccggcggcagctgccggctgctgttcgcccgctacaccgccttcacgtgccccgacaggcgccggcccgcggcgctgctgtgctgcgacgtgaagctcgagttcgcgctcgcccacgtcgccgaggccctggcgttccaggccgacgactcgctggtcctgcggctctccgccgcgcccctcgtgtactaccgcacgtcgggcgacgacgtccacggccgcgtgcccttccaactcgtcgacgccgacgacgacccgtggatacggaccaccgacgtgacccggagcggcgccatcggccggtgcttggcgtacagggtctccttcgcggtgcagttctggccgacgatgagggtcgcgctggagtgcatgcagaggcagggggtccccgtccacgtacgcgacagacggtgccagggtttcaccgtgctcgaggaggcaggcttggtgcagccgatgcgggacgcgttcttctccccgcggcacgacgacgacgcaggggcagggctacggttcccggagctgtacttggtcaacgtgctgatgcacaacggggtagtcaatccgcaccagatgacaccggagttcttcggtttgctgatgaggacacgcgaagatgtgaacgttgctgcgctgacggaactgttcggtgcaaagcttggagtctgtgataatccatgctggaggttgaagaacgcgcaggacaaggctgccaagaatctcgatcttgtctgtcgcagcagcagcagcagaagaaaggctagtgattgcgatgctgaggtgcgaaggctgatcgtcactccaaccagggaatactgtatgccgcctcaagtggagcgctccaaccgcgtcatccggcattaccacgagctgtcagatcgcttcttgagggttacttttacggacgagggtatgctgccgctgaaccctaacgcgctgaccctccgtgcggtgccctcgacgtcgacgcccagcacgtcccggcagatgacaagcgtctacaggcgtgtccagacggccctgacggaggggctcatcatgtgtggcaggaggtactcgttcctcgcgttctcagccagccagctgaagcagaagtcggcctggttcttcgcggaggacggagcgacaacggtggcaggcataaaggagtggatggggcagttcccgatcaggaaccccgcgaagcacgccgctcggatggggctgtgcttcacgtcttcgtatgcgacggtgacgatgcagcccggcgaggtggacgaggacctcgaggacgttacgcgcaacgggtacaacttctccgacgggatcggggtgatcacggaggacctcgcgctggaggtcgccgagatgctgccgctggcggacaggttcgccccgtccgcgtaccagatcaggtacgcggggttcaagggcgtcgtggctgtctcgccgccggggccgggacaagaagaccgtgggacgcggaggatgtcgcttcggcccagcatgaggaagttcgagtccacgcacaacgtgctggaagtggtgtcctggaccaagttccagccagcgttcttgaaccgccagatcataacgctgctcaccaccctgggcgttcccgacgactccttctggcagctgcaggaagcgatgctaggcaagctcaggcgggttttgtcggacagcgatgtggcgtacgaggtcgtgaccaactcttgccctgagcaaggaagcaccgcagggctgatgctgggcgctggcttcgctcctgcgactgagccacacctgagagcgatgctactggccatctgcacctcgcagatgcagggccttctgaacaaaacgtggatctttgtgcccaagggaaggtggctgatgggctgtctcgacgagtttgggatccttgaacaggggcagtgctttctccgggtctcgacgccatcactcggcagccgctgcgtgaaccgttctccgatatttccctcggaatataagggcgatgccaatgcacaggtgattactggtacggttgtgatggcgaagaacccatgccttcatccaggggacgttcgtatccttgaagctgtggatgtccctgatctgtatcaccttgtcgactgcttcgtcttccccaagaaaggtgagaggccacacgccgacgaagcttccgggagcgacctcgacggcgacgtctacttcgtgacgtgggacgagagccttgtacctcctgggaggaagagctgcaccccgatggactactccccggctaaaacaaagcaacttccacacgacgtacaccaacaagtaagtacaaagtaccaccttgcttcttcctttggtttggcttgctgccataatacatcaagttaatggatttctcgtgtgctcttgctgtaacaggataccattgatttctacttggagagcatggtatacgacaaccttggtcgaatatgcaacgcccatgctgctcatgctgatcggagcgacgacggagctatggatcccaagtgcattgagttagctcggctcgcatctatcgccgtggactccgccaagaccggggaaattgtgagaatgccaccagccctttcaccaaaagagtaccccgacttcatggggaaggaggacgccatctcttacagatccgaaaagatccttggaaggctctatcggtcagtcctaggggaaaatgacggcgattttctgtcacgaggcgcatgcatttcagatgagattcgatatgacgccgatctagaagtccctggcgcctcagactttcttcaggatgcttggcgatgcaggtgcctgtacgaagctcggctgaatgccctgctcgatcaatacaatgtgcgcagtgaggctgagctcgtgacaggggagatatggtcacttgccggatgcagcaagaagtatcagcatcaattaaaagagaggatcaactatgcgtactccaaagtccaccaagagttccggatcatctttgagagcattggtgcctctactgacaacaaaaacctggcgtatgagatgaaggcgtccgcgtggtaccaagtaacgtatcaccctgaaatcatccgatcaagggagcctggtgatgaggatgcacctacgagacttagctttgcatggatcgcagttgattacttggcacaaataaagatgaagcgccacgtagactag

SEQ ID NO: 698 - DNA, 5322 bp, Zea mays
  source 1..5322: mol_type = genomic DNA
acctaggcatacctttgcttttaatgtatacaactatgttaatttttttagtttaatgagtttcatgatgttaatattatcaacctatttattataattgctataaaggatattttgtatgactataggtgctaaaatctatgataaatataatatgtatgtgtgcactcaataacacacaacttttttggttaatccctttatcatatcattatgtttaaatttaccatgatcattctggtatatcataacactcacattcacatatgaagtctgttgaccgaccaccatcaatcctaaacttatcacaattgaatcaagccaggagatttttagtgtggatataccacggaccgcttgagatgttacaaaccaaaacacatcaatagatgctaccgatggatcatcacagcagctgtaacattgtaattccacttagcatgaacataatactggcctgtcagtgtctgtatatattcgcaaaggtatcaagagatctgctggccggggacgcaaatcattggatgactcttcaaatccaaagaacgacgatgacttcatgcctcccctaaagggcaagtgtcgcgttacttttgatgacctgttgcgtcttgcgtatggatcgaagggatttaggagattacatccctttcttagagggtgtaaatggtatgaatattatatgtctatattcgaattcgatctgcttaagggcttgctcgattagggtggattgaggggattagagacgattaaatcccttcctattcaattttaaataggaaagagatttaaatcctctcaatcccctgtaatccccacacaaccgaaacaagacctaagagggcgaagacccgatccgtattcgagcccggtattcagtatctgattcatattcaatttatattcgtatattcatagttggatatttaataagtcgacatccattctaatcttattcaacacaactcgataatattcaaatccgtatagaaaatacgaaaacaaatattgcaaaaacattattcgtccgtatccgatccaattacacccctacctcttttattcaattttgactagcgagagatttaatccccttcgatccggacgcaatcgaacaaaactttataggctagtttggaaacataaatctgcttgggttcccctttatttccggggtaataaatatctagaagtgatatttgagtaagatatttagttatttgtgacagatttctttccctagatttagcttcccttgcttctaaactagatctaattgtcttgttcaattacatggatattagagggatggagagatccctatccgtacaagctctaaaataggaagggctttcgtacaactccgagtctggtgatcgatctgcatcctcagatcaactccgagtctggtgatcgatctgcaccgtatctagtataaatatcgccaagcagttttctccctgcagaagagaggtattcgaggagacgagagtagcgatggcgcgcagccgtactcgcagccccgagtcgactcgccgtcttgctcatcgccttcgcgctatcaagccatccaagtccaaccaacagcatccccatcacgaacgtcggcggactgccggactccgtccgccgggacacaacttcgccgaggagtggccgacggggccagcgacgcgggcgatcctgaccggcttcgacgccggcctctcggcgcgtggcctcgccgacgagttggagcgcgtggcaggcaccgtctggcgctgcaggatcaagacttccgtcacaccgcccgagtcctacccggacttccagctctcagtccacaccgccgccgccgccgtattccaccaggaccaggacgagccgccgcgggacggtcgcgtggcccctcatgccttcgtccacttcgagcaccgcaatgccgcggaccgcgctggcgacttcttcacgacgcgcatcctcgcgcagagcagacacctggtacatggccatgcggcgcgccggcgggatggtgtcaccgacgccgccaaaccgatgctcttccccgactcgcgcatcgagatcggcgacgtcgtggcgccggacaccttcctcgtcgcgtggcgcgggaccgacgacagcgcctcggcgctcgacttcgtggtggacccgtctggcggcagctgccggctgctgttcgcccgctacaccgccttcacgtgccccgacaggcgccggcccgcggcgctgctgtgctgcgacgtgaagctcgaattcgcgctcgcccacgtcaccgaggccctggcgttccaggccgacgactcgctggtcctccggctctccgccgcgcccctcgtgtactaccgcacgtcgggcgacgacgtccacggccgcgtgcccttccaactcgtcgacgccgacgacgacccgtggatacggaccaccgacgtgacccagagcggcgccatcggccggtgcttggcgtacagggtctccttcgcggtgcagttctggccgacgatgagggtcgcgctggagtgcatgcagaggcagggggtccccgtccacgtacgcgacagacggtgtcggggcttcaccgtgctcgaggaggcaggcttggtgcagccgatgcgggacgcgttcttctccccgcggcacgagcacgacgacgacgcagggctacggttcccggagctatacttggtcaacgtgctgatgcacaacggggtagtcaatccgcaccagatgacaccggagttcttcggtttgctgatgaggacacgcgaagatgtgaacgttgctgcgctgacggaactgttcggtgcaaagcttggagtctgtgataatccatgctggaggttgaagaacgcgcaggacagggctgccaagaatctcgatcttgtctgtcgcagcagcagcagcagcagaagaagaaaggctagtgattgcgatgctgaggtccgaaggctgatcgtcactccaactagggaatactgtataccgcctcaagtggagcgctccaaccgcgtcatccgacattaccacgagctgtcagatcgcttcttaagggttacttttacggacgagggtatgctgccgctgaaccctaacgcgctgaccctccgtgcggtgccctcgacgtcgacgcccagcacgtcccggcagatgacaagcgtctacaggcgtgtccagacggccctgacggaggggctcatcatgtgtggcaggaggtactcgttcctcgcgttctcagccagccagctgaagcagaagtcggcctggttcttcgcggaggacggagcgacaacggtggcaggcataaaggagtggatggggcagttcccgatcaggaaccccgcgaagcacgccgctcggatggggctgtgcttcacgtcttcctacgcgacggtgacgatgcagcccggcgaggtggacgaggacctcgaggacgttacgcgcaacgggtacaacttctccgacgggatcggggtgatcacggaggacctcgcgctggaggtcgccgagatgctgccgctggcggacaggttcgccccttccgcgtaccagatcaggtacgcggggttcaagggcgtcgtggctgtctggccgccggggccgggacaagaagaccgtgggacgcggaggatgtcgcttcggcccagcatgaggaagttcgagtccacgcacaccgtgctggaagtggtgtcctggaccaagttccagccagcgttcttgaaccgccagatcataacgctgctcaccaccctgggcgttcccgacgacgccttctggcagctgcaggaagcgatgctaggcaagctcaggcgggttttgtcagacagcgatgtggcgtacgaggtcgtgatcaactcttgccctgagcaaggaagcaccgcagggctgatgctgggcgctggcttcgctcctgcgactgagccacacctgagagcgatgctactggccatctgcacctcgcagatgcagggccttctcaacaaaacgtggatctttgtgcccaagggaaggtggctgatgggctgtctcgacgagtttgggatccttgagcaggggcagtgctttctccgggtctcgacgccatcagtcggcagccgctgcgtgaaccgttctccgatatttccctcggagtataagggcgatgccgatgcacaggtgattactggtacggttgtgatggcgaagaacccatgccttcatccaggggacgtccgtatccttgaagctgtggatgtccctgatctgtatcaccttgtcgactgcttcgtcttccccaagaaaggtgagaggccacacgccgacgaagcttccgggagcgacctcgacggcgacgtctacttcgtgacgtgggacgagagccttgtacctcccgggaggaagagctgcaccccgatggactactccccggctaaaacaaagcaacttccacgcgacgtacaccaacaagtaagtacacaataccactttgcttcttcctttggtttatcttgctgccataatacatcaagttaatggatttctcgcgtgctcgtgttgtaacaggataccattgatttctacttggagagcatggtatacgacaaccttggtcgaatatgcaacgcccatgctgctcatgctgatcggagcgacgacggagcgatggatcccaagtgcatcgagttggctcggctcgcatctatcgccgtggactccgccaagaccggggaaattgtaagaatgccaccagccctttcgccaaaagagtaccccgacttcatggggaaggaggacgccatctcttacagatccgaaaagatccttgggaggctctaccggtcagtcctaggggaaaatgacggcgattttctgtcacgagatgcatgcatttcagatgagattcgatacgacgccgacctagaagtccttggcgcctcagactttcttcaggatgcttggcgatgcaggtgcctgtacgaagcccgactgaatgccctgctcgatcaatacgatgtgtgcagtgaggctgagctcgtgacaggggagatatggtcacttgctggatgcagcaagaagtatcatcatcaattaaaagagaggatcaactatgcgtactccaatctccaccaagagttccggagcatctttgagagcattgatgcctctactgacaacaaaaacctggcgtatgagatgaaggcgtccgcgtggtaccaagtaacgtatcaccctgaaatcatccgatcaagggagcctggtgatgaggatgcacctacgagacttagctttgcatggatcgcagttgattacttggcacaaataaagatgaagcgccacgtagactag

SEQ ID NO: 699 - DNA, 7932 bp, Zea mays
  source 1..7932: mol_type = genomic DNA
gcaacagtccggaaaaaatctggatcattttagattttatattttcattttagattttatatattctgtccgtaacactaaagtttatttaaattatagagattaaactttagtccctaactattttaaattaaccccgtgccccctaattaatggaagaaggacgagagacactaggtgaaggtgtctaaccaatagaacatcatgctcaaatatttttaatattgaatataaattatatatatatatttttttgtaaaataaaaaaatataatcgtgtcgagccaggtcagtaccacgggccgaggctacaacccaatcacggcacgtcattcttggttcttgcaagcattaggtcgtttttgagactacattgacgcaatggactcaatgatgtttgaggttgttgaattggatggagcaacaataatttgtcacactaacagtaaaatgaaaggttatttgttgattttaaacgttagtaattgttacgaagtagcataatttatatggagcgcatccagttttattgatgcctgactttagcaatcactccatgttttaatctatcttttttataagtttgagttcatgtgacttattttagaaacttgagcacacaaactttctcttatttggtctctatatggtggaattatgttattttataatctctgttcgttcagtcagtcgttgtgaactctcttctaatcgctcacttcattgaccgtattgtattaagacatattggatggagtaaacaataacatcagttagccaaatcaaaaaatattatacggagagcggaaacaatcaatacaaaatcttgaatttttttggtggatagtttatatggacattattgtaaaccgtcgcaacgtacgaacaagcgactatatatatatatacacgataaatacggccatacatacataaatgttatcacgttactaaaagatctacaaaaatattaaacgttaacaaattcacgtaattgcttcataaaaacacatcacatggcacaatagaaaagggaaaaagtgaatataaaatagatttaaacatgcataatgtttccttgttgcctgtttgcatgtttttaatagatagttagttcattacgtgcgatgacccgtatgttgtgatctgcgagctacagtacttgtgtcagtttagcaccacttaaaagagagagatgagtaggctgatgcgcttagaaaaataaatatattcaagtggagtagtaaatgatagcttataaaaacaaaaataccatcgatattttcctgaaccataaatacaattcatgtatccttttatatttacttccgctaactatttcggttcaggtatccttttaattttctttctttttttgttttggttttttcccttgattattgggtaatcagtagatacggtaaacgatattcgcttggtatgaattttcctatcctattttctccctatatgaagactcgccccggaccctgtccactcaccactcaccacagtctccagtctccactgcatctaaaaaaaaacgtaaaacccccaccacgccgtagcggagagaagagaagagaggagcgcgcgatcgatgtcgggctccggcgatcgtcgcggcggcggtcctccgggttcccgtgagcacctcccgcctctccccctgttttcccttgtggttcgtgagtggacggatcgtgcaatgccggatcgtttaaggggtttgggtagggtttagggttgatttgcggggaattttctttcgaagatctgattcttttcgtgcctgcgggttggtcgcttgtgtcgctcgatttttttcggcggtttgtttcggtatgactggggttttggaggacgaggggcgaatgctgcttcgcgtgggtgcggaatcggtgggcttgtttgagcgttccagtgggttgtcagcgctttgcgcggatccgtggtttgtgatatttttacaatcattccgatttctgttcgcgagtttaggttttacgtcttgaacaggggttcaagttatgttgttgattttatatagttttttttcgttggtcttaatcaagtctgatactcgttcagttgtctcctcataaggttacttcttacttgcatggttgctggtgtcattttttttaataattgctgttcatctttttagtttgtgttccactttatctcattctttgataacacactgaataactgaatgattcttgacaaaattatgttactgcattggtttggcattgtagatctggtaaactctggctatgtacatttcatcaagtgaaaggcttgatgtatgtgatttacttatgtggtggcagcatgttattcctattgcagagttgattttgtatgcattttttgtgattgcgatgcatactttgagcctagtgaaattagcacggtggccaccaatggttatcttaacgggtattggtcctatgatgacttgcatgtatctcttgacaattagatctgcagctagcttttggtcaatatattagctaccgagagaactttgataattatgaaattactatgttgaataggtaaaaagtaattagcatcattgtgtttcatagtggagtatgatgttcattgccattactaacagatacatgctgatattaatttatctgaccctgcataatggtaccctgcatacagatagtggctgggaaaccatggggaagaagtcgaagaaacccgggcaagccggggggagacagtgggcaccatggagttccacaaatgtgacacctaacacagcaaggccagcatggggtggcagtggttcctcgcacccttctggaaccagctgggctcaagctccagatcatggtgctgctaccagaggcaatcctagaccgccatcacaaacatcgcgccctgttctggctccacctctggcaaatggttggcagtggcaatccaggcctcgcccatctggatctgaagtcaagaaggatgatgctcctccatctggttctgtccctgaggtggagaatgttgatggcaacaatacatcagatgatgatgatgatgatgacgatgatttgagtgatgatatcagtgatgactatgattctgacgcaagtgagaaaagttttgagactcgaaaaacgaacaagtggttcaaagagttctttgaagtattgaatacattgagtttggaacaaattaatgaacaaactcggcaatggcattgcccggcatgcaaaaatggacctggggcgattgactggtacaaagggctgcagcctttagtgagtcatgctagaacaaagggttctacaagggttaaacttcacagggaattggctgcattgctggaagaggagctttctcgcaggggaacttcagtgttaccagcgggtgaacaatttgggaaatggaaaggactgcaagaaagcactgatcgtgagatagtgtggccaccaatggttattgttatgaataccttcttggaaaaagatgaagatgataaggtgactgattttttaatatataatttatattagcagtatgttttccctgtgaaatgctaagtacagattttgcagttgggttccctcatcccttttaagcataacttaacacctatgcatcttcttagagcctttgatctgactgaacaaaggtgcaatatgctccctaagtggatcagtttatattacctttctatatttattttgtgttgtgcatgttgaccacaatgatcctctttattatcttatatataataccattcttctaattggcttcaatacattacgtccccacatttttgtgagctgagttggattataaatgcttctttctaagatcttatagaaaaagacctttatatctttcaagggccatacagttaagttgcattgcattctgatttctgtttgtttgttgacctgatctagtggaagggcatgggaaaccaagagctccttgattattttggagaatatgaagcaagtaaagcacgtcatgcctatggtccctctgggcaccgtggtatgagcgtgttaatatttgaaagctcagctgtgggctacatggaagctgaacgtctgcataaacactttgttaatcaaggtacagacaggaattcatggcacctacgcaaggttcgatttgtgcctggtgggaaaaggcaactatatggtttcttagcaaacaaagaggatatggaggcatttaacaagcattgccatggtatgttttcttacaaacttaatgctttctgttctgtgtatatgtttttttattctggttaacaacatgatttagtggacttctccccaaattctttatgccttgaataatgatatctgttaagtctgattaaaacttgtacatgtgaaatatttttttgttacaggaatcataaggacacatgaagttcaatatttctatccttccacttaattgacataggatgtgtttggttttggttctgcttttgaaacctgctgaaccaaagggttcagcttttttgtagctactttgaaaaaactgcttttctatagtacaaatttgaaagcagcttggaccctgcttttgctgcttattgaagtttgttatattaataaacagacacaataaactgaaactaaaataggattaaaataattaagtgttataataaatgaaataataatatttttaataaaaagtattacaaatggaattaaaaaattgatttatttttgaaaatatcagcaatacaaatgtgaaatcacttcttaattagacatattgattaagagatatagttaaacaaagtgcatataaaaaatatacaatttgtttacagtggacaactcacaacattttgaaccaaatggatttcagcttttttctcacagcaacttttcagggtaggcagctcacagtagttttttcacaggtcacagctaaaccaaacacacccatattatatgattgttacttttagtaatcattttgttcatccattggtaatgcatgtttcaatagtatgctagtatttattttgtgcctagtcctctgtggtctttccttttgctttacatcgtgcttatgatcatttctgtggtggctgaaccacaacgtcagttttataacaatttaatttttagaagtgcatcactctgtgccctgtctagaattgtagtagcttttcaatagcacttgcttgtgcttattccatttacatttggaaaaagttcatgactttgcttatgcttgtacttctaataataattttgataacctattgataattggtcctatgttgttttccatttttttccatcctgtttaacctattaaggccaagcaaagtttttatggtggcagaaacataacatcagtcttatttcatttaatttttaaagctcatcactatatgctctgtttggaattcggatttgttctttctcaagagcagttgcatatttctaaatctggatgcagcacttagatgaaagcatcttgttttggagagcaatagcagcaaaatcttgctaatatttcataaccaactaacttaatccacagtgaagcacaacttaaaatggcacttacttttcgatagaacgaagaacgatgcacaagtctgcatatttccttctttttataggtcaattagttttggacaatcatgtgacaagaggataccacagaagctaaaaggcaagtagcaagttttataggatgacgattagatctgttatgttgtatgctgtagaatgttggtctaaaaaagatgtcatgttcaacagataattgatgtagaaatgcgtatgttgcattggatttgtggccatacaagaagttattgagtctggaatgatgatatatgtgtccaatggagacctatagagtcaccaatgcgtagtgggatctaaggcatgataggaatgggaagggagacaaggaaaggctgaagttgacatgggaagaggcagtaaaataagacttaaaatgatggaatatatccaaaagtttaatcttgaataggagcgaatgaaaaatagctgtctgtgtgcctgaaactagatttgtggcttctgttaggtttcaactttagcctacctcaacttgcttagcaaggttttgttgttgagttctaggcatttgattagtgcagctcctttattcaaaggtctgcttgtgaaggggggatttctctatgaacttttggagcgtttccttttctactaaatcaaaataatatggccaatatcgtttcctgttacgaaacatcaaaacagatgcttcttttcttcttgtgccattgtgaaaatacatcacccacttttcaaacggtacaacagataaatcaatctctaacctgtttattgaaatatgaagccttccaagtccaagtggagtgtctttgaaatacagacatcaagctgtagtagttatgttgcatctaccgagcaggacgccgagcattttaatagctaactatatttttatcttcactataatttcaggtaaaagccgtctgaagtatgagatgaggtcttacaatgagatggtggtgattcaaatgaaacagatgagtgaagacaaccaacaactgaattacctgaagaacaagatggttaagacagagcagcgatctaaagcagtagaagaatcattgggtgttgttacccagaagctacgtgagactattgaagaaaatatatttgttaggagtaaagcaaaagagaagcacatggagtacgaggaagaggtaataaggttacccaagtggttatattttctactaatgaacatgcgtggatcaacaattttcatctgtgccaatgatagagtttgctgtttcttggagggtcacacttatattttgcactttgatacttctgtgataagattgatgctgccagctttcaatttgaccacctgttgttgaccacttgaccttgatgttgccatctttcgatttcactacctgttgaccttgtttccatgctttgcagatgaagtcccaggaggaaatttttcatggtctaattgaggatattcacaaggccacagaggataaagaaaagcagtttgagaagttgttgcaggaagagcgctcaaaggccagacgctttgatgttgattctggaactatgaaagatcgtcagctaaggtgtgtcactaattcgtggttggatcatgttaccatgcctcaccacaattggaactaaaagtaatgtaaatgctccatctcaatgcatatgagagtcgtcaagaactgtttcctgctgcagtcgtctcatgtaggcatcacaggttcaatgtgcatatctgttgctgtttatcattctcaatccatccgcgtcttgtgcaggaaggaatatgtgcagaagttcattgattgccaagtcaaggatgtggcagagtttgaagttgagcgagatgagctgatcaaagtccacgaggacaagaagttgaagctcaagaaagaatacatggatctggagctggagctggagaaggagtttgacgcagccctgacgggcctgatggagaagcataagccagataccttcgaggcctccagctcgtaagggggcttcagcggctaagcgctttccttaggccccagctaagcttggagcagtctcgtacatgctcctgcttgcttatccatgaaataatgcctggacagtctgtagatgttgcgaaaacatggtgccccctgtggttgccgcgtgtgtagtaagtatctctcagtcgtagtgtggttgaagcatctgaactcttgagcggtttgcctgtgatggcatatgggtcaaactacaactggagtgtgatatctagtttatatggtccagcgctcttgttgactgcgggtggtggtttgccccggataatttactgattatgtctgctccgatcgtcaaagtgcctctttctgttttttttctt

SEQ ID NO: 700 - DNA, 14528 bp, Zea mays
  source 1..14528: mol_type = genomic DNA
cccattgccggttatgccatgtcagacaatccacacgagaaaaatactgatttcgactcaactgtgcaggcccgcctgacacaaccagatgctctaagcaagggtgtagtattccctctcgtgctggtcaaagtcgagagcagcaaggacatagatcgcgtagatgattctggtgacataaccaaggattgtgagcagcagccagatgcagaactctatctgttaagaagatagagttctcttgcaccaacctcaaatacgtgcttctgattgtgttaagcgtgtgattcacacaaacatgtgaagagattatacctgaaccagattatcttatagtgccatgtaattgccttgtgtgtcccacaaaattgagatgtccatgggagaaaagtagaataagaggtgctactgtagcattatggtaccactgtttgatgttttgaaaatttgtaagtcaactctcctgagtctggaacgatttaacttgtgtgctttggactgatggccaaagtatgcatatgctgtgtttgctgaatttttgcccccaagccccaattggaccattgcgaccacattagaaggcagtacatgtattcaacagaacatgtgaagaatgagtattgtttgcataaattcgatagccatgcctagacttgctatgcattgccactgtatttggcatgcctagaactgctacacaaaacttgctatgtattttgtctaaaaatactatatccttgatatgcttgcttgatctatattttttctgctcttctattcttgtgtgggtttatcaagaatgaggcaattagataagaatatatgctttgtcaatattgtctgagactttgttaatattagaaggcagtacatgaattaaacaaaaccattgttttgtttattatgatctgaacaactcattttatatatggagctcgtggcaatggcagccccgcaaaaggatgatggaactcatggcgttgagtggtggcgtgcttaggctcgtgatcctctgcaacgaggcactgtttcccacgagcgttcccatcaccattgcagtcacgccacacgtcgctaggccttgagcggttggaggctcgtcaatttgtctttcgtcgcaacgcacgggtatatacctagtcactatataactattcgatatgacttgtttaattttttaatacatatatagacaaacaattgtcagtggattgtcgtgctagcaacttttaagccagatattagctgtagcgcattcaacgcaccgccgatgataatattcatatcagattaaccctgcacgggtcccgagctactactaatcataataaatgccgtttttatacggaataccagaccagttgtccgagggcctgcttgccaagttgtcagtaactgtggagagcacgagaaagtggggcatctactttttttagactactgctctcggcctcctctccgctccattttcgcaattccttcgagctccgctccggtgaagggcgctccattttggagatttcgcaacctctgcctcgttctgccatttttttttcttgcctgcaccaacgtcatctaaccagtcattagttggtgaaatcctccactcccctgcagaccacgtcagccttcaccttgccgtctccgttacgcgccgcgagcccgcgagcgtttggggagttttggagcggaggaggcaagggaggacggacagggaagtttggttgtggaaatggatgtggtggaatcctcgccgtcgtcgtcgccgatatcgtctccggccgggtcttcggagtccatagacctcaacttcctgccgttcctcaagagggagcccaagtcggagcccgcgtcaccagagctcgggcccctgccgctgcctgcgcccccaacccagacgccccagcagcagcatgcagcggctccggctcctgaggccacggcgcctctgtcgccagcgactcctgacctctcgtccgctccggtgatggcgccgctgcagtcgctgccgcctaacctggacgaggacgcgctccttcgggagtactaccgcctcgcgggcctctacctctcgtctgcgaggtccggggcgatcatcccagcgctagctccggaggcggccgcaccggcggtggtgcagtcggggtccgggtctgtcgtgaagaagcgccggccgcgttcgtcggacctcgtgcgggtctcctcgctcggcgtgcaggaccagatctacttccgcgacctcgtgcgcagggcgcgcatcactttcgaatgcctccgcgggcttctactcagggacgacgagcgcgccgagtccctcggccttgcggccgtcgccgggttcggcgttgccagggaccggcgccgcgtccgcgcggacctgcgtgccgcagcgctcatgggggaccacgacctctggctcaatcgcgaccgccgcatcgtcgggccgatgcccgggatctcggtgggtgacgctttcttcttccgcatggagctttgcgtgcttggactccatggccaggtgcaggccggaattgattatgtcagtgcagggaggtctgcatctggggagcctatagccacatctataattgtatctggtgggtatgaggatgatgatgatcacggcgatgtacttgtgtacactgggcatggcggccgtgatcccaacctccacaagcattgcgtcgatcagaagctggagggcggcaatcttgccctcgagcgcagcatggcttatggtattgagattcgtgtaatccgtgctgtcaagtcaagacgaagccctgttggtaaggtttacttctacgatggcctctacaaggttgttgactactggctcgaccgtgggaaatctgggtttggtgtttataagtatagactgctgcggattgagggccaagaacccatgggtagtgtgaattatcgagtagctgaacagcttaaggtggatgtgtttgctataaggccaacagggtatttgagctttgatatctccatgggccgtgataccttgtcagttgcactcttcaatgatgttgatgatgatcaggacccactcttattcgaatatctggcacgtccaatatttcctacctctgctgtccaggggaagtttgctgaaggtggtggtggtggttgtgattgtgctgagatttgctcaattggatgtaactgtgcagggaggaatggtggcgagtttgcatatgataggactggaaccctgctacgaggcaagccactggtatatgagtgtgggccatactgcagatgcccacctagttgccccaacagggttagtcagaaggggcttcaacataggcttgaggtattccggtcaagggagactgggtggggagttcggtctttggatctcattaaggctggcacattcatttgtgagttcagcgggattatccttactcaccagcagtcagaggttgtggcagcaaacggcgattgcttggtgcgtccaagtaggtttcctccaaggtggttggattggggtgatatatctgatgtctaccctgattatgtggcgccagaccatccttctattcctgagttaaaatttgcaattgatgtgtcaagggcaaggaatgtggcatgctatttcagccacagttgcagtccaaacgtgtttgtccagtttgtgctgtttgatcattacaatgtgtcttacccccacctcatgatctttgccatggaaaacattccaccgttgagggagctaagcattgactatgggatggttgacgaatggattggacagttaactatgtagctggagtatctatttagaaggcagtaatctccttcttttacctttatttttgaagttttcattatgcttcactttgggatcatcaagccaactgctggctaaaattcctcagctggtaattgtccttattcttcatatgctattttttgggtacttcataggactttcttggcagtaggtgctcataattttccttaaaggttgctttgtgtatgtcactgagtttcatgtgtactttaaattttatattttgctatactgtatacttctgcgcagatctagactaattatactatctagctatcctcctaatttctctacctcattgctgattcagtgctttggttaaataaatctatactgtagttgcagaagaggttgtatgtcacccatttggtaaaccgtatagtgcacatgatcctcagctgtggcccatggcccttactagttatgtctatacactgcatcctaggaaaatctaaatagtcactttattctttttccagtaaggaagatgatgattttattgcataaccattaggtgaccatctctagtccatttccatgttggtcaacatctctgttttgtggtgaataggacagcagtagcagtggacagcagcagcagcagcaacagtcttttgactgctgtaggacagcagcagcagcagtcttttgactgcactttattatctagagaacaacacctgtgtgctgcagtgtgtagtgtagtgtgtagtgcagcccctagggctataaatatgtgtccccaactcttctaagggtatgacattgtgtagtatttgagaaaataaacagaaaatcgcctcaactcatagtgtcatcctctcgatgagagtaagagtcctgttgcttataattggcattagagggaggttgtcttgcagcctaaacatctcttgctcatctccttcccgcgcctctctctatacttagccggcagcaagagctccaactgttccttcctctcctgctcggacgagcagccgttcatctgagagagcctattccacacgcaacgacccctcgctagcacatcatgtctctacactcgatcacttcgagtgcgtggcgccagcaggagcccaaggtcgccgcagcacaagaacacgagcgagcagcgacagcggcgagggtggcacgactagcggttgcggaactggcagcaacgagagcggaagtagaagcagcagaggcagagacagagctcgaggctgagtagcgccggcagctctgtttccggcgatggcaacaccaacaacgagctaaggatggcaagggatgcagcgcaagagcagacgactcaatgggcagccatgcacccccatgagggcgcacgcggcgacagcctagataggcgcagacgcgccgacagtgctccgggcgagaatgcacgcggcgacagctcagatgggcgcagacgcgccgactgtgctcccggtggtggcggccgggtccatggagatcgcggcctctacaggcggcgcgactctccctccccggatcgataccatggtcaccgtggggtccatgccgttgtcagggacatcggtcccggcggtgggtggcctactctcaccaagaccaactacgtcgagtgggccgcagtgataagggtacggctccaggttcgccacatgtgggaagcagttcggtatgacgacgtcgactactacgaggatcgacgggcactagatgccctcattgctgtagtcccgcccgagatgcatttttcgctttcccagaagcggactgccaaggaagcctgggacgccatcgtagcgatccgcattggcagcgaccgtgcccgcaagaagaggggtatcgatgggcaggaacgccggccgggggcctctgcccacggccgagcaagaggagggtttctcccttctaattcttgcctactttatttctcattcattgattacataaataggccagctggccgtccctatctagctagagatccttatctccttaaaactctcctaaaaactctcaacaactactaattgataacgttcctagataatctcaactaatctcctagataatctcaactaatcttgtctctaactatccttatctaatcctccttagagggtccatcgctgctgctaccgcagctcctccgtgggcctccttaggccctgacactacacccctcctggacaagcagctcgtcctcgagctgcagcatgacgagtgctcaaataccgagtctacttgacctaaaaccagacacctagaagacaagccttttacatctcggcttatcttattattccgaatctgaattttttttttaccccataagataaggcgaacaccctccgcgcattggacttgtacgtgtgcagccacctggatcccatggacgccatcttgacgaaaggggagcacatggacgggcacctggaataggttgcaacaataaccagcgaaggcgccctcgtggcggccggtagcggaatgtggtggcgctaaatagtgcgcccttgccgatgacgaggggagtgccttccttaccgccactgccgtagagttgaagttcgtcgcccgcgggacacgtaccatgctcgcacttggagatagcggcccgatgccgctgctgatggccgtccgacagggtgaggtcgcgcccccgtgtgccgaggtcaaccgtgaccaaggctgcctcgagcatctgccgacgcatctcccgcgctctccgtcgtgcaaggaagccacgagcagcagcttgtatgcccacagccgccgacgtctggagccgtgcggacaacgccaaccggtgctgctcatgttgcactgctaccttgatttgcagcagcccttgctcaaccttctggagcgtggcttgcatctttgcgagatcagcccttacgttggtccacaagtcccccatcgatggagctggtgattgatgagctgtggctgcccctagtggcgtcacccatggggacggagatgccgtcaacgaagatgatgtgacaaaatttggcgttgtccctggagatgggcacgccggcgtccaggatgtggtgacaaaattggcaggcgatgctgcccatggagatggggacgccggttgccaggatggtgtgacgaaggtggcatacggcgtagcccatggagatggggacgtcggttgccaggacggcatgacgaaggtgacatgcggcgcagcccatggagatggtgacgtcggttgccaggatgacgcagcaaaattggcagcagaagccatgggatcagatcgaaacccaagctagccgataccagatgttatggtcgctagatcggtgagggattggagaggggtatcgatgggcaggaacgtcggccgggggcctctgcccacggccgagcaagaggagggtttgtcccttctaattcttgcctactttatttctcattcattgattacataaataggccagctggccgtccctatctagctagagatccttatctccttaaaactctcctaaaaactctcaacaactactaactgataaccttcctagataatctcaactaatctcctagataatctcaactaatcttatctctaactatccttatctaatcctccttagagggcccatcgctgctgctaccgcagcccctccatgggcctccttaggccctgacactacacccctcctggacaagcagctcgtcctcgagctgcagcatgacgggtcctcaaagaccgagtctacttgacccaaaaccagacacctagaagacaaaccttttacatctcggcttatcttattattccgaatctgatttttttaccctccgcgcattggacttgcatgtgtgcagccacctggatcccatggacgccatctagacgaaaggggagcacatggacgggcacctggcgtaggtcgcaacaataaccagcggaggcgccctcgtggcggacggtagcggaatgtggtggcgctaaatagtgcgcccttgccgatgacgagaggagtgccttccctactgccgctgtcgtagagttgaagttcgtcgcccgcgggacacataccatgctcgcacttggagatagcggcctggtgccactgttgatggccgtccgacagggtgaggtcgcgtcgacgtgtgccgaggtcaaccgtcaccaaggctgcctcaagcatctgccggcgcatctcccgcactttctgtcgtgcaaggaagccacgagcagcagcttgtatgcccacagccgccgacgcccggagccgtgtggacatcgccagctggtgttgctcatgttgcactgctgccttgatttgcagcatcccttgctcaaccttctggagcgtggcttgcatctttgtgagatcagcccttatgttggtccacaaatctcccatcgatggagctggtgattgttgagtcgtggctgcccctagtggcgtcgcccatggggacggagacgccgtcaacgaagatgatgtgatgaaatttggcgttgtccctggggatgggcacgctggcgtccaggatgtggtgacaaaattggcaggcgatgctacccatggagatagggacgctggttgccaggatggcgtgacgaaggtggcatgcggcgcaacccatcgagatggggacgtcggttgccaggacgatgtgacgaaggtgacatgcagcgttgtccatgaagatggggacgccgattgccaggatgacaccgcgaaattgggagcagaagccatgggatcagatcgaaacccaagctagccgataccagatgttatggtcgctagatcggtgagggattggagagggaattcgatggttggggatgctggtggaggtggtgcggtactgttcatgcgtgaacagtactcgcggatgttatggtcgctagatcggtgagggattggagagggaattcgatggttggggatgctggtggaggtggtgcggtactgttcatgcgtgaacagtactcgcggttactgttcacaggacaccggccgggggtctctgcccgcggccgagcaagagggggggggtttcccttctaattcttgcttactttatttctcattcattgattacataaataggccagctggccgtccctatctagctagagatccttatctccttaaaactctcctaaaaactctcaacaactactaactgataaccttcctagataatctcaactaatctcctagataatctcaactaatcttatctctaactatccttatctaatcctccttagagggcccatcgctgctgctaccgcagcccctccatgggcctccttaggccctgacaatgaccttcaagccaggtgaggatgttgatgactttgctcttcgcctcaacactgtgttgcagaagatggtacagttcggcgatgacacctacgatgaggagagagccgtcgagaagctcttccgttgcaaccccgagaagtacaagcagatcgctcgctcaatcgagtctctgctagacctctccacgatgacgattaaagaagcgattggtcgggtccggcgtctcgcattctggcgggagagttgcatcttgcatgcggcgatggcgagcctcggtcttttgcggaggctgagaaacacgcgtcttagcgtgtcgcgatgcagtcggagatgggcgcggttgagacgaaccgcacctgggagctcgctgatctccctcatggtcatcgtgcgatcacccttaagtgggtgttcaaactgaagagggatgaagccggcgccatcgtcaagcataaggctcgcttggtggcacacgatttcttacagtagtaggggatcgacttcgacgatgctttcgcccccgtggcacgatggaatccgtgtgactccttgcgctgttagccctggagggttggcacgttcatcacatggacgtcaagtctgtgtttcttaacgacgacttaaaggaggaggtctacgtacacggtccgccaggatttacgatccctggcaaggagggcaaggtgttgtgcatgcgctccctctatggcttgcgacaggccccgagggcgtggaatgccaagctggattccacgctcaagaggatgggcttcatgccaagcccgcacgaagcggccatctatcggcggtgcaatggagaaaatgccctgctggtgggtgtctacgtcgacgatttggtgatcatcggcgccaaggatgcagaggtggtggcgtttaaggaagagatgaaggcaaccttcttgatgagtgacctggggcatctctccttctacctggggattgaggtgcaccagagtgactctgggatcacacttcgtcagaccgcctacgccaagcgcatttttgagctggctgggctcactaattgcaatccaactctcactctgatggaggagaggatgaagctgatccgtgacagcatgacagaggaggtagacactactcaataccggcgtcttgtggggagccttcgctacctcgtccacacacaaccagatcttgcaatgctccgtcggctacgttagtcggttcctacaacgatcgacgatggagcacgagcaggctgtgaagaggatcgtccgctatgttgcagggactcttgaccacggtctctactactcgaggtgccctggggaggcacaccttgtcgggtacaggtacagcgacaacgaccacgctggcgacatcgacactagcaaaagcacaagcgggatcctcttcttcctcggcaagtgcgccattagctggcagtcggtcaagcaacaggtggtggccatgtacagctgcgaggctgagtacatagcggcctccaccgcttcaactcaagcactctggctggctagattgctcggtgatctcttcgggagagacacgacatcggtggaactcagggtggacaaccagtctgcattggcgtggccaagaaccccgtgttccacgaacggagcaagcacatccgggtgaggtaccacttcatccgtgactgtttggcagaagggagcatcaaggcgcgctacatcaacaccaaggatcagcttgcagacttgctcaccaagccccttgggagaatcaagttccttgagctttgttccagatccgagatggttgaactttcccacaagacgacacacaagacttagggagagaatgatggaataagtcatgtggtcttcgtgtgcaggacaacatctatgttttgtggtgaataggacagcagtaacagtggataacagcagcagtcctttgactgctgtaggacagcagcagtggacaacaacagtagtcttttgactgctgtaggacagcagcagcagtattttgactgctgcaggacagcagtagcagcagtcttttgattgctgtaggacatcagcagtagcagtcttttgactgcactttagtatctagaggacaacacttgtgtgttgtagtgtgtagtctagtgtgtagtgcagcccctagggctataaatatgtgtccccaacccttctaagggtatgacattgtgtagaatttaagaaaataaacagaaaatcgctccaactcttagtgtcatcctctcgatgagagtaagagtcccgttgcttacagaggataccattgtagctgtttagtttgaactaccagatcctatgagacaaggtttcatcaagattatgtgtggtagcaaagattgatgtctggtgcactatacaagaattcttgtagcaaactcatgtgtttgaaacttagaatcctattacactaagtttgtagtcctgatcattaaaagattcaatgatgagcatattgggcttatgaagtttggcagtcttaattgtatgaatgttgaatgcctggctccttaaaattgcagctttggccaccagcccaccaaaacatctaaatggtgagctgtcactaatggagtagtgttaagagtatgttttttcctgttgggcataggccttgtatacaaggggtgctactatatgtatgccacatgtacttgttaatgcaattaatctattctcctccaatattgtattggagttctttcctgccctagccgctagctacaaccctagttgctgactctctctctccccacctctcttctcggccaccgctagccatggctggctgcctgccacctcatcgccccggtgtggtcttcccccaccccggtgcggcctttccccctctctcctccccttctctactagccgtagcctgtccagccgccgttgggtcctgggtggctgtcttggccctcgtcctcgatgccggcgactcggccagccctggcgcgggtttgttggccatcacagcctcccctcccgccctcgccctgtccaacatcatcgggccttgggtggctaccttggcccttgtcttcgtcggtggcggctcaacaagcccttgcgtgggtctgtcggccaccggctcgggcacctacctcgtctagcaccagcagacaaagcatgtcgagatcgacctccatttcgtctgcgaacgcgtcgccattgatggatgatgatgttcgtgtctcctggtcgtcaaagcggcaacatgttgtctcctgctcgagtgtcgaggccaagtaccatgccgtggctaacggtgtggctgagacatgctagtttcggcagctccttttggagcttcacagccctatctacagtagcaccctcatctaccgcgacaatgtcattgtagtttttctctccaccaatctcgtctagcaccagcggacaaatcatgtcgagatcgacctccatttcgtctatgagcgcgtcaccatcggtgatgtttgcgtccttcatgttccgacgactactcagttcgttgacatcttcactaagggcctacctatgtcggtgttctcagagtttcactccaagtctcaacatctgttgttgctagagtttcgattctgggggtgttagagtatgtttttcgcttttgggcctagtccttgtatacagtccattaggggtgctactacatgtatcccacatgtattggttaatgcaattattctattctcctccaataagtaggtgccttgtgctgctgactgtgcaaaatctttgatatgtctagacatcactggtttagtggttcctgttatgtatgcatgctataatagaatacttcataaacaaaacatctgttgtatgtggtcagcgggcattaaaatcatgttgaccaagcttcagatatttctgtggcaaactattgaatagagtgaccctttttcctgttttgttggtttagacccaaaccaatatctttcactgatttgaagtctctttctagctattctatgtccaactgctctttgttcctccactcattatcacaaatgatcagttgttccctgtgtatgccattgtcacttgtacatttttgaaacagacattttgctcattgctctattatatttgtgcaagtattttgcatgtggttttcacaaaaaattattgtggttcatatgctatgcagtgatagttattaactgtttacctactttcatatttgcctcaatttgttatggtttcaaatttagtgcatacaaaagttttggatagttataactcaattttttgtcagatttatctgatagctaaaacttttatttgtttttataatatggaagagacatcttgtacatctatgcatgaaaactgataattaacataagcatgcaggagactgcttcatagcctgtagaaatattttttgtaaattttgggtagcaaatatcatgagttagcacacgtgacttttactgtgaatttattattgatttgtgttatttggcttttattctagtttgcagtcacacatgtgcctcttttggttttcttttattcagttgagtgtatttctacatacctgatgtgaacttacaattgtccaagccatgatgatttatgcataaatctaattagctgtgcacattattactttgtacttttcctgtatttttgcacttacatatcggttcttagcgtaatattgtactattttattttttttcttaagtcatttgatccactttagattcagatcctcttgtctttttttgcatgcttgatcccaccccaactcgtgttggtccggaatatgctgattgcgtgatgtatatgattttagaatgaaaccctgtgcatcgttaagtgtttttttctatgcttgcataatttacttgagtaacagttttcccctgtttcctaagttttagctaactacacaaatgtggttgatcttggttgtttaattactagtcttttagaagtcctaaatttatggtatccttgtttcagtccagcagtggaggtttccaactagcataatgttcctctggcgttgaaagaggcttgcataaggtgaccaagctatcatcaacagaacatcagccgttcattgtatatgttgcctgataacctaggtgccttagccaattttctagatgatctcgcttttgaagtataatgtgtgctgctgtaggaagcttgtttggcgtggctggcgctgagtttcagccttaaccttcgtgttatgagttgtcgctgttggaactcattttctgtacatatatctgtaaattatctagctggaaatgtgcccgcttctgttgggaaatgttggtccatatgtggcaaagttatttggataccttgtggaattgaagattccgcggagccaggtttgtccgtaggtcattgcattaatgattttgtgaaattatttgtggtgaa

SEQ ID NO: 701 - DNA, 3995 bp, Zea mays
  source 1..3995: mol_type = genomic DNA
ggggtgtcttctgatgtcatcaatccagatcgcttcattgcttcagagataggaacagtttccgcaccttcggcttcgtcccctcgcgctcaactctagcagtagagcgcactctggccatttaattttgaatttcttgaaaaatttcttagaaaataataaccttctcttccgaagctattcttctgacgaagcaaacaccaaattggagcttcgtttgaatgcgaaaatcaagcttcggctatggttaaaaattttggcagcaaaacagtgcaatagcaatgaatgctgtggtaacttcacacctactcgtctgtttatatagtgctgcaggtaagaaggtgaatcgtcaggatttttacaccaggcaaacagttgctcgcacccgctgaatggtgggccgcaaaaatcagaacagtgaacctgcatggtgggaccgctacacgctcgaaagatgtatcgtttctcgacaacgagctcaggaaaggtgttttttggaccttcggcttcctgaagcctaagagacttttttcacggatcaagctcgttacgaaaaacgatctagcaccgcgaaggggctactgttgggaccatgcttcgtcgccgaaggtcctgcaaaaagaaacagtttcaactgaagctgcttgaacatgatgccgaagacaccgttcacgaagcttcagagctacaacatatacgaagacgaagggttgaaccgacttaaagataaaatgaccttttagccttcaaaggtctgagtcattgttgtaaacttttatgaggggcataattgtaattcctcatgggctgtgtcctgtgcctataaatagtgaacaatattcctttactgttcacgcattcctgtaattgctaacgcatcactcgggaattattgtttgtcaaggcaaaggtataaatgtacctaattgttgtattcaaatatcttaaattcatataataagatatgtgaatgatgtcatttattttcaatgtatttacctttagtgtcccatgttttattttactttgtattatccttataagtttaattacgaagatgaaaccttcgtaatattatgttcgtgaccttcgtccgaagttcattaaatccttgtggagataatgtttcggcggacgaataatattaatatttaacattttatgttgtcttgttcttaattcatagcattcaagaacaagtccccaacaatccgtcttctaaattctaggcccggcactgtctcaagtagaggtttttgtgtggattctattcgtacttttagtcgcctcagcggaaagaaacaaatctatatattttatgtagtagagaagaagaaaaatagaagagaagattttttggttgtccttatctatttgttaggcgagaagtaagagaaaataatgtacctacgtgttttgttcgtgaagtatggataccaagtaccaacggtagaaaattatttataggagtgagattccgttggagctcgtctggaggacgctctattttggggagattttgcaacctctccctgactgcgccatttttttttctcgcctccaccaacgtcagctctccagtcaccagttggacaagcgggacgggacaacatcctcaccagccgcaatcctccactcctccccgcagccctcgaccctcgtcagcctctccagttcacctcgccgtctccgtcatgccccgcgagggtttggggaattttggagcggaggaggaggcgagggatggtggacaggaaggtttggttacggaaatggatgtggaggaatcctcgccgtcttcgtcgccgatgtcgtctccggccgggtcgtcagattccatagacctcaacttcctgccgtttctcaagagggagcccaaatcggagccgtcgtcaccagagctcgggcccctgccgctgcctgtctccctcacccagacgccgccgcagcagcatgcagcggcggcggctccagcaactgaggcctcggtgcctccgcctccggcgactcctgacctctcgtccgcgtcgatgatgaccccgctgcagtcgctgccgcctaacccagacgaggactcgctccttcgggagtactaccgccttgcgagactatatctctcgtctgcggggtccggggcgatcgtcccgacaccggcaccggaggcggccgcaccggcggtggtacagtccggggccgggtccgtcgtgaaaaagcgccggccgcggtcatcggagctcgtgcgggtctcctcgctcggtgtgcaggatcagatctacttccgcgacctcgtgcgccgggcgcgcatcactttcgagtgcctccgcgggctgctactcagggacgacgagcgtgctgagtccctcggcctcgctggtgccgccgggtttggcgttgccagggaccggcgccgcgcccgcgcagacatgcgtgccgcagcgctcatggcagaccacgacctctggctcaatcgcgaccgccgcatcgtggggccgatgcctgggatctcggttggtgacgctttcttcttccgcatggagctctgcgtgcttggcctccatggccaggtacaggcaggaattgattatgtcagtgcagggaggtcggcctctggggagcctatagccacatctataattgtatctggtgggtatgaggatgatgacgatcatggcgacgtacttgtgtacactgggcatggcggccgggatcccaacctccacaagcattgcgtcgatcagaagctggagggtggcaatcttgccctcgagcgcagcatggcttatggtattgagattcgtgtaatccgtgccgtcaaatcaagacgaagccctattggtaaggtatacttctatgatggcctctacaaagttgttgactactggctcgaccgtgggaaatctgggtttggtgtttataagtataaaatgctgcgcattgagggccaagaacccatgggtactgtgaattatcgagcagctgaacaacttaaggtggatgtgtttgctgtaaggccaacaggttatttcagctttgatatctccatgggccgagagaccttgccagttgcactctataatgatgttgacgatgatcaggacccactcttatttgagtatctaacacggccaatttttcctacctctgctgtccaggggaaatttgctgagggtggtggtggtggtggttgtgattgtgctgagatttgctcaattggatgtaactgtgcaggaaggaatggtggcgagtttgcatataataagactggaaccctgctacgaggcaagccactagtatatgagtgtgggccatattgcaggtgcccacctagttgtcctaacagggttagtcagaaggggcttcaacataggcttgaggtattccggtcaagggagactgggtggggagttcgttctttggatctcattaaggctggcacattcatttgtgagttcagtgggattgtccttactcaccagcagtcagaggtcatggcagcgaatggtgattgcttggtgcgtccaaataggttccctccaaggtggttggattggggtgatatatctgatgtgtaccctgattatgtggcgccagaccatcctgttattcctgagttaaactttgcaattgacgtgtcaagggcaaggaatgtggcatgctatttcagccacagttgcagtccaaacgtgtttatccagtttgtgctgtttgatcattacaatgtgtcttacccccacctaatgatctttgccatggaaaacattccaccattgagggaactaagcatcgactatgggatggttgatgaatggactggacaattaaccatgtagctggagtaacctatttaaaaggcagtgttctctttctttcttttccctttatttttggaattctcataatgcttcacctggggatcatcaagccaactggactaaaattcctcagctggtaattctccttattcctcatgtgctatttttctttgggtacttcat

SEQ ID NO: 702 - DNA, 8319 bp, Zea mays
  source 1..8319: mol_type = genomic DNA
cctcggcacgcgcgcccgtgccgcccccggcgggcatgcgacgtcctgccctgcccggccgcgcgcacgccgctgcaatgcaatgcaagcaagcctgctgctgtctgcggcggcacgttctgtacgcatgctcaggctcagctcgtaggcgtgtgagtagacgtggctacgaggaactagggcctgcggtgcttgttgctgctggactggaccgccgcgccctctgtgcttgccgctgcctggcagaagcgaacacgggcgggcgggggcggccgtgattaaaaacgggtttcacccatgagggactggccggtggccgccagtggcttgtgcggcgatgccggcgagtctgttctgcgatagtgttggagcgccttcttgtcggggggggggggggggggggcacgcttccaaatcgcgagcgcggccgtcgaggcggctagcttgctctcgctcgtctctctggcgttttgctgcgttttctccgctttgttttgccaaacctagaggctcgtgccggtgcttgtctggactctggaccatgctggtgacctaatagtagtactgtataggtaattaggtatagacaaacggtaaagtccatgtgaagaagtttcaccttcaatttggctcttctcttcgatttggcttcctatttgttttttcccctccaactcgaacggaccgcactgtggtagtagatgttttgccccccaacacaatgtgcatctgttctgtgtccagtgtggtgtcacaagaaaatcgtgacagtgtcctgcagaggcctggccccgcccggctcggcctcggctcacagtttatatacactgctttcgagagtgatgcatgcatgcatgagacccattctcgagccgtagtagcatctggactacttaggtgctagtaccagcagtagtagcggattattctgcacttgttttgtcaccatccacagattaataaaaaaaacattccgaacacatactacgcagcgagctgcgtgcgatggagtgccgccacgcttttctataaaaatccccatccattcttccccctggaaacacaccaaccgaagcccatccatccactgtctcgtctctcgtgcgtgcgtgccccggctcgttttccacggcttttttacgggccgcgccatcaccatgcatggcttgcctgccgctgccgcccgcgctagtggacctccagcacaatccccggttctccgacgcctgccacctttgttggtaaaaaacagtgaggacgtcgctgccgcttccgtcatgactgttcaccagactatgaccgttcacagactaccctacccctccccctccctcggccggtcccgttcccgcgccgcccgccggccgcccagtccctagcatagcaggccaaacctgcctccgcgcagttgctgccgcgtcaatgctgccgtgccgctggagagagagagagagaggttcttctaatgcccttctgttctgtcccgcccccgcgccgcatttttttttcatttttttttaccttgcgtgacgcttcgttttcacagtgcggcggcggcggctgcttggctcgttgctcctcccattctgctcagctcagcttctgatgagttcgcctttgccgctgctagttaccagcatactagaccactgactgatcacgttataaggcttccgcgcaggcgagcttctgccgccttgtcgggtaaccaaacggacctcgccggccctctccagtggtcacatcacatcacatcacatgctcgaggtcgtcctggacatgacgccgccgccgccgccgccgcaggcgcggctccaccaggggtcatcagccaagggcgggcacgcggagcggaggaagcaaccgctgcagagcagcgtgacacagcccaaggcagagcccgcggcggcggcggccgtgctgccggtgccggagggaggcaagaggtgcagagggggcgggaggcgccgcggcagggccaaggcgcccggtgagcctcgcgccgcgctactagcgccagcgcaggcgcagacgcaggcgcctccgccgcgcacggtcattgggccgcccgtgccgagcaaggggctgtcattctgccgccggccagggttcgggacggtgggcgcgcgctgcgtcgtcaaggccaaccacttcctcgccgagctcccggacaaggacctcacccagtacgatgtaagtgctcgccgcccattccacctcgctggccttgaggaccgccagcgctgcgcaattgagatcaaaaggcgacgcttttatttgttttcttttttccacgcgtggttttgcaggtgaagatcacgccggaggtgagctcgcggaccgtgaaccgggccataatggcggagctggtccgcctctaccgcgcgtccgacctggggatgcgactcccggcctacgacggccgcaagaacctctacaccgccgggacactaccgttcgacgctcgcgagttcgtcgtgcgcctcgccgatgaggacgacggctccggcgtcccgcctcggtacgtgcctccgcctgcatttgtttcttgcgccactcgggccgcctgagcctccttgtacgtctttcttaacggcatgccgccgtactgattcgcgtgattgccctaccccccagggagagggagtacagggtcgccatcaagttcgccgcgcgcgccgacctccaccacctcaggcagttcatcgccgggcggcaggcggacgcgccgcaggaggccctacaggtactcgacatcgtgctccgcgagctcgccaaccagaggtatttattccattggcgcctgcattgactgcaacgttgcccgtttccattcttgaatttgaggaagcgcttcttctcccccacgttggttaggtacgtgtccatagggcggtccttctactcgccggacatcaggaagccgcagcggctcggcgacggcctgcagtcgtggcgtgggttctaccagagcatccggccgacccagatgggattgtcgcttaacatcggtgagttattgtgccgtgcctgtggttggggaatatttgttgccctcatgcatgcgatttcttttttgtcccgtggctgctgcttacacggcgatgttgacggcagacatgtcgtccacggcatttattgaacccctgccggtgatcgagttcgtggcccagatattaggaaaggatgtcatatcaaggccattgtccgatgctaaccgaatcaaggtaatattactgtggttgcgcaaggactctagcatagtactacacgaatactccctccgtttctttttattagtcgctggatagtgtaaaattacactatgcagcgactaataaaaagaaacggagggagtatataacagctgccattgggcgctagtattgcttatggattaatatttatcttgtgtaattcgcttattttgccaatcagatcaagaaggcattgcggggtgtaaaagttgaggtcactcaccgggggaatgtacggcgcaagtatcgcatttcaggcctcacaacacagccaactcatgaattgatgtatgtttagattctgaatgatttttactagttcctgaagtgctgttgttgtcatctctcttcccagtggtggatctagatttttttttggtgtggggggagggctgcacctaaaagagcaagaccaacttaactcagctatatcccatacaaaattagcatatagctgttttaagcattttggccctgtttggcacaacttattttcagcttcttcatagatttaagtagaagatgtgctaaacagtcagcttctccagcagcttatcagttcagctgattcttaaaatgaactaaaagcagaagctgtttttcaaaagcttatcagctgtgccaaacaggcctttacacaataacttggataaacaattgaaaaccctggtggtaaatctgcccgactctttcgatacatgatgtagcctgatttgatgagcataaaacagtggtaatatgttgacacaaaaaggcggctatactcaacttgtgcttacattattaattacattgattatctaattcaccttagcagtgaatacattcgacaaataaaatatgtgatggtgaaaggttgttgaacattgatgcctaaatcagttgatcgttttttttcctgtttttcacagtttcccgattgatgaacaaatgaatatgaaatctgtcgtggaatacttcaaggaaatgtatggtttcaccattcagcatcctcatcttccctgccttcaggttggaaaccaaaagaaggcaaactatctacccatggaggtcagtatatatgctaatcacaaacttatgttgcttatcaattctgtttatgtttctggttagtgttagactctaataatgtatcgttgtaatgtcgaggttttttaccaggcctgcaagatcattgaaggccagagatacacaaagaggctgaatgaaaaacagatcacatcgctgctaaaggttacatgccaaaggcctagagagcaagagatggatattctacaggtcgagagtttttgttgtaaccagtaaccctattattaaagaagtaacttttgaacacaacattctgtatgttgagctagagttttattgtaggtaaaatgaattatctctcttgaactaatggtacatattatgtgtggagctaaatgttctatcattcaaggtttttttgttcatgaactaatcggaacattgcgagaagacatgcattataactgttcattgtcctatcctagagtactgcatttattttccagtggtccatgctttccatgcagtgggcctttaatagacagccataaatacagctaggatttttcactttttataagtgatggttttaattaatcaaaagatttgttaaaatggctcaagaaacaacattatttgttttcagacagttcatcaaaatgattatgagcaagatccatatgcgaaggaatttgggatcaacattagtgagaagctaacctctgttgaagcccgagtccttcctgcaccttgggtaagaataattttatgtcacttttttcctttcaggagcaccttacactattatccatgaggttagttgctcattgttgatgcatcgaacaatttttttgaattcagttgaagtatcatgacactggaaaagagaaagagtgcttaccacaggttggtcagtggaacatggtaaacaaggtaaaattccagcttgtgtgtaattactatgtttgattgcaatacttttgggcctaaaaaaatcattttacagaaagtgataaatggatgcaaggtgagccattgggcatgtataaacttctcaaggagtgttccagaaaccacagctcggggattttgccaggaattggcacaaatgtgtcaaatttcgggcatggtatgatacctctcatctgtgctcatgtttgtgcacaagacaaaaacttgtttaaattgaaactgtaagcatcttttaatttgacttcctaagtattacaggaatttaacagtgagcctgtgatgccaatatattcagctagaccagatcaagttgtgaaggcacttaaaaacgtgtataatattgcattgaacaaacttaagggtaaagatcttgaacttcttttggctatcctccctgacaacaatgggcagttatatggtaagtgccatctgctaattgctttgaatatataattacttcaactcttacatattttatcagatataactttatatatatttaaagcgatataacttcatatgtgtaggtgacatcaaacgtatttgtgaaactgatttggggttgatatcacaatgttgcttaaccaagcatgtttttaagatcagcaagcagtacttggcaaatgtctcactgaaaattaatgttaaggtacttaccaccttgtttatacataaaatacagtttagaacatcaactatataagtggctctattattgactaatggtaccaataaaattcagatgggaggaagaaacactgtgctcctggacgcaataagttggaggattccgttggtcagtgacatcccaactattatatttggtgcagatgtaacacatcctgaaaccggggaggactcaagtccatcgattgctgccgtaaggctcgttactactttgccatttcttcatcaatatgtcacattcatcaggatatgcacatccttatttttgttccgaacttatctgtctgcctctttctgctcacaggttgttgcttctcaagattggccagaagttacaaagtatgctggattggtttgtgctcaggcacaccggcaagagctcattcaagacctttacaaaacatggcacgatcctcagagaggcactgtaacaggcggcatgatcaggtttttatctacgagcaatgtgaaatcctgaagtgcaatatacaatttaatctattaaaaatattggttgatttgaacttattttctgtgatgtttgttgtgtagggagctcttaatatccttcaggaaggccactggacagaagccattgagaataatattctacaggtatggttgtgtaaatgttgacatcacctgtagcttgcagatggcaataataaaacatatctgatgcctactattgccatgtgaaaattttctacgttagggtgtaggttagtgatgtatcacatgtcttctttatgttgtaactaaactattattttccttgcaaaactaaatgatgcatatgctaaatttgttgaattttctttcagggacggtgttagtgaaggtcagttctatcaagttctcctttacgagttagatgccatccggaaggttgggtgcattttaatgtttttttattcttctaagctccttatagtttactaactagcgtttttttccaggcatgtgcatccctagaaccaaattaccagcctcctgtaacatttgtggtggttcaaaaacgtcatcatacaagactatttgcaaataatcacaaagacagaagtagcatggacaagagtggaaatattttgccaggtagtgtatctacggcctctaaatctttaggatgtgtatctatgaccacattatttcaagtgacatattccaaactttattagtactcgaactcaaaatgtattatgttttggagtaaaaaaatattgtctaattttaagatgttaagaaattagccactcttttgaggcagccagatttttcttttgtttaaatcgcattacattgaagcaagatgtaacaccctacatttttcttttgactgctcacaagttgattgaaacaggaaccgttgttgattctaagatatgccacccaacggagtttgatttctacctctgtagtcatgctggaatccaggtaaaagtaatgtggatttgtggaagaccgatattactttgtgcaatcctgacattacatgttagctggaatattctaccgtacctgtcatttgtgagtgaccaatagtatcgaaaagactaagaatacaaacttatcctatttggtcaaccttttaatcatgtgattgtacagcttatggtacttggatcagtagcatgggaatgtagtcagactctccgtactatactggaatgactgatgtgtgagtttgccagggaacgagtaggcctgctcactaccatgtcctctgggatgagaacaatttcacagcagacgaaatgcagacattgacaaacaacctttgctacacgtaatgcacttcttttatatgctatgtttgtcccttgcactttgaactttgaactttttgagaattttcttagattgatgtatactgatgcagttatgcccggtgcacacgctcggtttctgttggtatgttctgtgctttacaggcaaatgttttcccagttccacaattcttaattgactctttagcctgctcaccagttcaggaaacaactttgacctgtgatgttgtatctttttgcttcttaacagtccctcctgcatactacgcacacttggcagcattccgggctcggttctacatggaaccagagatgttggacaaccagacgtccaagacctccaatggcacgagcggagtctcggtgaagcccctgcctgctgtgaaggagaaggtgaaaaggatgatgttctactgctgacaaggagaccacttaaccactcacatgctgtagctaacttgctagagtttagtaaggattagatagctttctcaaggagtgatggatcaatctgatctgttaacgacctctgtaaagtactcggaaatggctgtataatagttgttgtttcaaatgtgaaagcatct

SEQ ID NO: 703 - DNA, 7402 bp, Zea mays
  source 1..7402: mol_type = genomic DNA
cctgcctgctggaccactgccagccagccagccagccgtgcccactgacggccggacgcgattagggcactcttcgttttgtcacttaaaaaaagagaacggttttcagtcgtcgtggttgcccggggttctgcggcgattctatctattctgcgctagtggagcgccttctcttgtcggtggcacgcttccaaagcgcgagagagcgcggccgccgaggcggctagcccccgctctcgctcaggctctcagctctgccgctttgctttgctttgttaatggccttttttctataacccatatggaccatgctgcgcggattaaagaaacccaaatagcatagacacaagcggtaaagtccatgtgaggaagtttcatctcaccgtggtatgtatctcttcggtttcgggtccggaacactgcatattttattttattttattttatttttctgtggctttctattgggcttttctttctccctccccccgaaccgaatggactggaccacattgtggtagtagctgtttccggcaacaaaacggtgcatttgcactgtgtcctgcagatgggaccggctcacagtctatgctactgccgctcgtatttcgagagcgatgaaacccccatcttgagcctagtgctcgtgtgtgccagcactagtagcggattattctgcacttgttgtcacgatccacgccttaataacattcctgacaccacggagcgagctatcggccaaccacacgaacatgcgcctacgccttttcaatagaaaaatccccatccacccccatggaaagcaccatccgaagccactgtctcgtgcgtgccccgagctcgttttgctcggcttttttttttaccggccgcgccccatcaccatgccatggcggctgccactagtggagctccagcacaatccccgcttctccgacgcctgccacctttggtaaaaacaggaggattcaatttcaatggctgtcgctgccatgtgttttcacaggccctgacctaggctctgagagaggagagagagagagaggaatttaccactcggccgcccccgttcctgtgtcgcccgcgccggacagtcccaagcaggtcaaacctgcgctgctgtgccgctggagagagaggttctaatgctcttctgtcccgcgccgcattaatttcgcgattttgagaggtctagtactccggtccggtgtagccgtgtaggaggacgcaagggcaaggcaagaccaccctttttcattttctatttttaccgcgcctcgcgtccgtccacagtgcggcaggcttcttggctcgttgctctcgttccgctcggcttctgcgttcgcctttgccgcctcgctgctgctccactgatcacgttataaggcttccgcgcaggcgagctgctgctgctgctgctgccgccgccgccgccttgtcgggtaacgagcgacctcgacgtcggacgtctcaagtggtcacatgctcgaggtcctggacatggcgccgccgccaccaccgccgccgccgccgccgcatgcgcggcaccatcagggggcagccaagggcggccacgcggagcggaggaagcaaccgctgcagagcagcgtgacgcagcccaaggcggaaccggcggcggcggcggcggcggccgtgctgccggagggaggcaagaggtgcggaggaggcggcgggaggcgccgcggcgggcgcggccgggccaaggcaccacctggtgagcctcgcgtcgcgctagcgctggcgcctccgccgcgcacggtcattggcccgcccgtgccgagcaaggggctgtcgttctgccgccgccccggattcgggaccgtgggcgcgcgctgcgtcgtcaaggccaaccacttcctcgccgagctcccggacaaggacctcatccagtatgatgtaagtgggctcgccgctcatttcgctttcgctggccgtgagcgctagcgcaattgagatcgaaacacaacgtctttttgcattctcctggtgggtttttttgtaggtgaagatcacgccggaggtgagctcgcggaccgtgaaccgggccataatggctgagctggtccgcctctaccgctcgtccgacctggggatgcggctcccggcctacgacggccgcaagaatctctacaccgccgggaccctcccgttcgacgctcgcgagttcgtcgtgcggctcaccgatgaggacgacggcaccggcgtcccgcctcggtacgttgcctgcatttgtttcttgcgctacttgggcagcctcctcgtacgtctgctgccttaatggcatgtcgtactgattcgcgagaattgcgtcccgccagggagagggagtacagggtcgccatcaagttcgccgcgcgcgccgacctccaccacctcaggcagttcatcgccggacggcaggcggacgcgccgcaggaagccctacaggtactcgacatcgtgctccgcgagctcgccaaccagaggtatttattccatcgtctcctgcattgatggcgtcgccgcacattgcccgtctgcgttcttggattccaggaagctaatgctggcgcttcttccccgttggtcaggtacgtgtccatagggcggtccttctactcgccggacatcaggaagccgcagcggctcggcgacggcctgcagtcatggtgtgggttctaccagagcatccggccgacccagatgggattgtcactcaacatcggtgagctgtgcgggctggggaatatttcttgccctcatgcatgtgattcctttcttttttgtcctgtggctgccgcttacatggccatgttgacggcagacatgtcgtccacggcgtttattgaacccctgccggtgatcgagttcgtggcccagatattaggaaaggatgtcatatcaaggccattggccgatgctaaccgaatcaaggtaacattactgtggtcgggcgggcatggaatctagcatatagtagtgcagcgatatctaacacttattatgccaagcagatcaagaaggcattacggggcgtaaaagttgaggtcacgcaccgggggaatgtaaggcgcaagtatcgcatatctgggctcacaacacagccaactcatgaactgatgtatgtttagattctgaatgatttttactagttcctaaagtactgttactgtcatctctctttcgatacatggtgtagcccgatttgacgaacataaaaaagaaatggccatctgtctaaacaaaaggcggttatactcaacttgtgcttatgtttatttatctaagtcaccttagcagtgaatacattcgacaattaaaagtatatgatgatcaagggttgttaaatcaccttagcctgatttttatctaattttcacagtttcccaattgatgaacaaatgaatatgaaatctgtcgtggagtacttcaaggaaatgtatggtttcaccattcagcatcctcatcttccttgccttcaggttggaaaccaaaagaaggcgaactatttaccaatggaggtcagtatagatgctaatcacaaacttatgttgcctgtcaattatctttacgtttctaattaatgttagactctaataatataacgttgtaatattgagtttttttaccaggcctgcaagatcgttgaaggccagagatacacgaagaggttgaatgaaaaacagatcacatcgttgctaaaggttacatgccaaaggcctcgagaacaagagatggatattttacaggttgagatttttttttgttgtaaccctaatattaaagagtaacttttgaacacacacccttctgtatgctgtgctagatgtactagggttttattctaagtaaactgaatcatctctcttgaactaatcttacatatattttatgcggagctaaatgttctagcggtctagtttttttttgttctccatgaactaaaccgaacattgcaagacatgcattatatctgttcattgtcctatcgagtactgcatttattttccagtggtccaagctttccatgcaatgggccttgaataggcagacaataatacagctagggttttcacttttataagtaagtggttttaattaatcaaaacttttgtcaaaatggcttagattattctttattttcagacagttcatcaaaatggatatgagcaagatccatatgcgaaggaatttgggatcaacattagtgagaagctaacctatgttgaagcccgagtccttcctgcaccttgggtgaggataatcttatgtcactgttattcattttttttcttttgggagcaccttacactattatttatgacgctagtagctcattgttgatgtgctgaataacttttgtgaattcagctgaagtatcatgacactggaaaagagaaagagtgcttaccacaggttggtcagtggaacatggtaaacaaggtaagattccagcttgtgtgtaattactatatttgattgcactacttttgtgcctaaaacaaactcattttacagaaagtgataaacggatgcaaggtgagccactgggcatgtataaacttctcaaggagtgttccagaagccacagctcggggattttgccaggaattggcacaaatgtgtcaaatttcgggcatggtacgtacccctcctctgctcatgtttgtgcacaagacaaatacttgtttcaattgaaactgtaagcttcttttaatttgacctcctgaatattacaggaatttaacagtgagcccgtgatgccaatatattcagctagaccagatcaagtagtgaaggcacttaaaagtgtgtataatattgcactgaacaaactcaagggtaaagaacttgaacttcttctggctatactccccgacaacaatggtccgttatatggtgagtgttatctgataattgctttgcatatatagttacttcttaaactcttacatattttctcagatataactttatacatgttgaaagcgatataactttatatttgtaggtgacatcaaacgtatttgtgaaactgatttgggattgatatcacaatgttgcttaaccaagcatgtttttaagatcagcaaacagtacttggcaaatgtctcactgaaaattaatgttaaggtacttaccaccttggttatacatcaaatacagttcagaacagcaactttataagagaaatggctcgatattgactaatgataccatcaaattcagatgggaggaagaaacactgtgctcctggacgcaataagttggagcattcctttggtcagtgacatcccaactattatatttggtgcagatgtaacacaccctgaaaccggggaggactcaagtccatcaatcgctgccgtaaggctcattactactttccatttctgcatcaacatgtcatattcatcaagatatgcacatctttgtcttggttttggacttatctcactcatatgctgctgacaggttgttgcttctcaagattggccagaagttacaaagtatgctggattggtttgtgctcaggcacaccggcaagagctcattcaggacctttacaaaacatggcacgatcctcagagaggcactgtaacaggcggcatgatcaggtttttatctatgagcaatgtgatatcctgaagtgcaatgcataatttaatatagtaaaaatattggttgatttgaacttattttctgtgatgttttctcgtgcagggagctgttaatatccttcaggaaggccactgggcagaagccattgagaataatattctacaggtatgtttgtgcacatgttaaccatcacctgtagcttgtagatggcaataataaaaacatatctgatgcctattattgccatgtgaatcttttgtaaatacgttagatacaggttagcgatgtatgagaatggtggtattcattgctagttacgtatattgtaactaaactattcttttctttgctaatctatgtgtatgttaaatttattgaatttctcttccagggacggtgttagtgaaggccagttctatcaagttctcctttacgagttagatgccatccgtaaggttgggtgcatttaattttttttcttctaattcttctaagccccttcatagagtttactaactagtgcttactttcaggcatgcgcatccctagaaccaaattaccagcctcctgtaacatttgtggtggttcaaaaacgtcatcatacgagactatttacaaacaatcacaaagacagaagtagcatggacaagagtggaaatattttgccaggtagtgtatctatggcctctaaagcttggccacactatttcaactgacatataccaaaatttattggtacttgaactaaaatgtattgtgttttggagtgaaaaatatcgtgtctaattttaagatcctaagaaattagctactgttttgaggcacagtcagatttttcttttgtttaaattgcattacattgaagtacttccccatgtttctatgactgctcacatgttgattgaaacaggaactgttgttgattctaagatatgccacccaacagagtttgatttctacctctgtagtcatgctggaatccaggtaagagtgatgtggtagactgaaatttgtggaatcctgacattacattttagttggaatattctaccgtactgaacctgtcattttagttggtcatatgcacaagctatcgctgcacctagtgaacaccgtatatgctaaaagaataataataataataaaaactgatcctatggtcaaccttttaatcatgtgattgtacagccatggtacttggatcagtagcatgggaatatagtcagattctccgtactgtactgaaatgactgacgtgtggcagggaacaagtaggcccgctcactaccatgtcctctgggatgagaacaatttcacagcagacgaaatgcaaacactgacaaacaacctttgctacacgtaacgcacttctttgtatattttatatttgtcctttgcacatttaaattttttttgagaattttcttagcttgttatacatgttattgatgcagttatgcccggtgcacacgctcggtttctgttggtatgtcctgtgctttacagacaaacgttttcccagctccacaattgtcatcgactctttagcctgctcacctgttcaggaagcaacttcgacctgtgatgctgtatcttttgcttcttaacagtccctcctgcatactacgcacacctggcagcattccgggcgcggttctacatggaaccagagatgtcggagaaccagacgtcgaagagctccaatggcacgaacggaggcttggtgaagcccctgcctgctgtgaaggagaaggtgaaaagggtgatgttctactgctga

SEQ ID NO: 704 - DNA, 8424 bp, Zea mays
  source 1..8424: mol_type = genomic DNA
cgaagggaactaaaaggcggctcagctatgaagagaggcgaaggcgaactgggatctgggatgatctggaggctggctgccgggctccttttatagggccaagtccgcgacccccgtgcttatccgcccacgaaaatctcgcaatcagttgagattttatagcgatcggttaggataagcgtaacagccaagaaaccaaaaaatcaaacggcaaaaggtagccgcgcccccgcaaggcgaggggccggatttcggcggaccattcacgcgcatgtcgtgcgcccgcgcccttcgccccgccccgccccgccccggcccggcccggcccggccaggcgagcgagcgcgcgcgcgcgtgtggctctccacactctctcctctcatccatgacttggtgagtgagtgtggcttccatatttaagttagctctactccataagagctagcaatatggtgctattggttccacctatccctttgccatccacttatatgggcttttgagattttcctgtgatttattagaaattcttaattgggccaagcccataaatcctaacattattgacgaaaaaccgacggtaaaccgccccaaagtgtcgattttccatgaaaatgaaccggttttcgctgttttttacagaaaatggaaaattttgacaatatttatttgtaatttactcaattcacattgcacagtaaatattaattgatccacacgacatgtgtttaccaaaataacatatagcatgcatatgcaacaaacaaccagcaatacttaaatactagttcttttatagttcttcaacgacatataggttgacttgtttcacaatactcatgtattcaacacgagtcatagtgatagtattcaggtatgttggaagaatcgtgatatggtctctcatcccacccccttgcaccactccccttacagcatatgatccaactgtttcattggcccattcttgcacttcatctgtgtctccttgttcgtgtacaagtgatataaacaacatgctagaaagatgagtgtcactattaggtgaatctttgtccaatgtcgaaggtgtattggaactaaactagcacttaaactggacaaaaaatagcatctaacagtaaataatcttcacatataccatataatagtaaacaaactaatacgactaaactgaacactaaatgactaaaccgaaactaaatcttaacatcaaatccggtttccccaaaaaaaatgtggttaccagttcaaaatgacggttcacatatatccgttttttatcaattatttttaattgttttgaatttaggacgaattttgaagaaaaaaaccgttggttaaactgaccggtttccccaccaaatgctcaggccggaagacttcagcgtaccaccggtcttctgcttgcccaccttggctataaaagctgcccgcagcgtgcgggtgctattcagtttcttcgctcttcatttcgccttccacggttctttccacctagcaaaaccccaagcctccttcctacgatggcctctcgtgggcgcggtggtggcggagggaaaggccctagcggtgggcggggcggtgaaggcagggggcgggggatccgtggcgggggaggttaccatcacggcgacgatggaggcggcgaacgcggaggcagaggcgacccgggccgagggcgcggggtcggcggtcgtggccgcggtcccggaggccgaggtgtcgacgaccaccagcagcagccgccgccgctcgggaacacagagggcggaggccagggccgcggcggcatggcggtagcggtaccgccagcccgccccgccgcgccctgtcctctagcgccggacgccgctgccccggcatttcccgcagcagcggcctcgtcttctgcgcaagcgcctcgagcccccaccgaggcggctggagctgccttggcggatggcatggggaagttggccgtggcggacgaccggcccgctgctcctcccgtgcccgcaggtaaacccgtcgcgcaaggtcccgcgcaccagccccaggaggctccgccactctcgaggaagaggatcgtgccgccgccccgccccggtttaggcacgtctgggagaaagctggcggttcgcgcgaaccacttctttgtcgaggtgtccgtgaacgacatcttccattacgacgtgagctccacccgcacacactccttcttgaacttggttctgcgcttcgcagcgtcgctttgcagcgtccgatttctctcggttgatattgttttgatctttgtacacgatagttttcgattctttctgtacagtcatgtgccgggatgtcgggggtgatattcaccgggctgcggcttcctttcttttcgaaaacgttctatttcagggctttagccgcgctgtaattttggaaaagttacatttcctgtcatcgagcaaatgtctacagcatgattgtgccgtacttgctgccttcttgttctgtatgcgcgtcggcaagagcgatcaaggtctttagcactcttgcattttggtggttgcacggtggattctttgtgtttcttggtgctgggagggttctttgtgtttcttatcaaacaaaaagaagaaatatattaaagccagctgttgggaccgttgatccatagagacaaaacaaaagcagtagaagcgagtacgtattaaaaccaaacgaataggctgaatttatttaccaggtaacttgaaccctcctatagatggccaataagcacgaggcctgtgagactggcacgaagcccgttgtttgggcccggtacgagcctggtacgacccggttctatgcgggcccgggccggcccggcacgaataagcgggctgggctcggacagaaaactaggcatggtgggttagcccgacacggtccatttacctctaagcacgttaaacccgctttttttgtactaaaacatggttttcggcctgtttagcccgctttttcatgctaaacgagccggcccaacccgtttacgcacgctgcgggtcgggctcgaacagagaatcgagcccgtgggcttagaaggcccggtccggttttctaaccgtgcctggcggaccgggccaaaaacgggccgggcttcatcgggctcgtgccaggccgggccgggcggcccgtttgaccatctctaaaccctgcatacctgatcagtagcactgcactgcacacttacagcgaaattgatatagatatccatttgtttgttatcttgcttattctgtcctaggttttgtttgctaaaatctgtgatttacgtttcttatgtatgcaagaaatattagttgtttgtctcttaatgtcttaattattgggatttttttgtgctccatacatatttgactcgatccatacacattatcaggttttaatcaatcctgaaccaaaagcaagaaaaaccaacaggatgctgctctcagagcttgtcaagatacatggcgcgacatctctcgcccacaagacacctgcatatgatggaagcaagagcctgtacactgcaggcgagctgccgttcaaatcaatggagtttgttgtcaagttggggaaggcgggccgagaagtgtaagcaccactcctgtgccctatactcctatgtgcagtacacttgtgacttgcagctgcttaatgctgactttttagcgtcctgttactttaattgctgaaattcagtgactacaaggtgacaatccgatacgcggcacggcctaacgtgtaccaacttaagcaattgatcaattctcagctaaggaacacgccatttgacgcaatccaagcactggatgttgtcttgagagagtcgccttctctcaagtaggatatcactgcctcctcttcactgtttgttctctgcaatattctttttcgttgagctggtagccatatgtgcttactattttttccttttgtttcacagctatgtaactctttctcgatccttcttctccaagaagttcggtgatgacgacattggcggtgggctagagtgctggagaggatattaccagagcttgcgtccaactcaaatgggcctctcattgaacattggtaaatgatcttcttctccaaaaaatcaacttgtacaaaattgcaccaaagatttatttgatttcgatttagtctcagtattgagagctctgactgaacgactctctgtctgcagtttcagtatgggaattttgtgtgtaagccagacacaagtcgctatgctggtgtgccattgttggttcgacatttatgtgtatttcagtggagctttgcatctcaagttcagttggcgcataaatatgaaccgtgctatttggcgtaatcaaaatagccaacttgtgtggtggcatgcatttctgaaagttgaaaatttgcctccaacataggtcttgtttggtagagctctcaacggctcttatagtagaaatttagaaatgcccatgttcatatgttttcgtttttaacctcttgagctcacctctgttcagatatatgctccctcgtttttaacctcttgaatctcacttctgttcagatacatgctcgacttcattttaccaacctatcgatgtggtaaaatttgttgccgattgtctccagctgacaaaccctggccaaccttttttggacagggatcgtttaaaggtacaatttgtggataaaagttgtcacatgcaatttaactcagtgaccaactaatctgttcctatctacaattttttagcttaagagagccctgcgcggagttcttgttgagactgaacaccagcagggaaagagaagcatctacaggataactgggattacttctgttccattggctcaactgaggtacccaccggttcatatctcttccctccttgcctgtttggtctagtaccaagaagacgaacttattcatttccatttcttgtcttcagcttttcttgtaacgaaggccctcagctgactgttgttgagtactttgcacaacggtacaatgtccagctgcgctacactgcttggccctgcctgcagtcgggcaatgattctaagccgatatatttaccaatggaggtaacattttcatctttggtgatttctgcacggcacctggtgcaccatgtgatagttttatcataatgttttttttcaggtgtgcaaaatcattgaagggcagaagtaccctaggaagctcagcgacacacaggtggccaacatactgaaggcaacctgtaaacgtcctcaggatagggaggagaacattattaaggtataggccaagataactttggcttcgacaacagtgccttttcgagtggcaagtgttcacatttaaatgagtaactttttgtactgaatattttcttttgaaatttagcattttgtttcctttcgtcttatcttttgttatttctgatgttttgtcacatcaactaaagtgtcataagtaaaatgtttatcttgtgtagatggttcgccacaacaactattctgctgataagatggcacaggtgtttgggatcactgtggccaaccagatggctaatgtgcaagcccgtgttctgcctccacctatggtatctattatgcaacgttctcagtttgatgatttgtgttttatattttttaaataattccaagaacctgtatttcaactttttcagctgaaataccacgaatctggaaaggagaaaaccgttgcaccaagcttggggcaatggaatatgattaacaaggtgattctatagttaaatatcctgatctttgtttttttgctttcaatatcacttttattttacgttgaaataagtacagaaaagtgtaaacaaaagatttggtggttcctagagttagtagtcttcctactgaggtccaccttttgtttccagaaaatggtcaatggtggaaccattcacagctggacttgtctgagcttttcgcggatcccgcttcgtttggtagacgaaatatgccatgaattggttcaaaagtgcaattccattggcatggtaaattcgtccacatgcttctggatattagtatagttgataacataatcatcagccacagcatgttgaatttgatgtcaatgatcttctagagtttcaatccaaggccggtgacagaagttcagaaagactcacacaacaacatagaagctgctttaagggatgttcacaggagggctccgaatctgcagctgcttattgtgattcttccagatgttactggttattatggtacgtgcatccttgaaaaatctgtgcaacttattataaactttgtgaaaatgaaattacatgcatgttgatatggtgaactttctttacacatttctatttgtgtttttttttggtgtagcatacgcaaggaacattattcacattttatgtgtagcacacgtgcagtttacttttccagggcacttgtgcttgctttcatggtaaacacatattgttgtgcaattttgtaggggaaattaagaggatgtgcgagactgaccttggtatagtatctcagtgcatcaatccgaagaagaatagaaacaagcagtattttgaaaatcttgcccttaaaatcaatgtgaaggtcagtcagtgcaatttactgctttcttatctctggtgtgcttcagttgttatggaaattaaaattttattctatgttttatcaggctggagggcgcaatacagtgcttgagagagcctctgtgcctaatgggataccttttgtctcagatgtgccaacaatcatttttggtgctgatgttacccatcctacagcaggagaagaatcctcggcttctgttggagctgtcagtttcttgttctctgttacaactgtgtcattcaaatgcagtggtaatttagaagtaaattttcactccacatttgagcacaaagtaatggaatagatggtataaccttgcaggtggttgcatccatggactggccacaggtcacaacatataaagctctggtctcggcacaagcacacagggaagagattatacaaaatctcggcggaatgataaggtaatttaatatcctctgtgttcatgaaagctgtgaatgaaactaaggtgccacgtaattatgctctgcagggagttgctgatttcgttctataagaggactggcaaaaagcccaaaaggattatattttacaggtatgtgcttgacttaactatctagataactcttggatgaagccttcatttcgtgacttcctttgcttttgttttgtttatttagggatggaataagtgaaggacaattcaaccatgttttgctccttgaaatggacgcgataaggaaggcttgtgcctctctggaagatgggtatctacccccagtgacatttgtcgtaatacagaaaaggcaccacacaaggctcttccctggagttcatggaaggagagatgttactgacagaagtgggaacattcttcctggttagtaccgcgatgttcatccttgtttaatgacaaccttagcattagcatttgcttgtcactgagattggaccctggttggtttaatgacaaccgccacattagccatactatatctttgggagatctccacttctaacacaagcatgatactattttgaacacatacatgcatgttggctgtaatttgtgactcttttcttcctgttaaaatacacaggaactgtggttgataccgagatttgtcatccgcgggagtttgatttctacctttgtagccatgctggaattcaggtatgttttagcagatacttggcttcttgagtgtgttatattcgtccccctgaatgtagattcatttctccagggaaccagcaggccaatacactatcatgtcctctacgatgaaaaccgtttctcggctgatgggctgcagatactcacaaacagcctgtgctacacgtaagcttagcttgatcctgatccccaatatatatttgctgccatctgaactcaagttttttttttgttgttttgcaaatgcagatacgcacgatgcacgcgcgctgtctcagttggtaagtctatgccagtttcaccaagttctttgtgtgattagtcaagtgtattgttacttcattgcttattggcactgtaatatttatcctgatcctccatgtgtggaacagttccaccagcctactacgctcacctggcagcattccgcgggaggtactacgacgaacaaggtagcagccccgcccccgatggaacctcagttgtcggtggcgatgccgctgcagccggtgatgatccacctgcgtgccgcaggctcccccagatcaaggagaatgtgaaggaagtgatgttcttctgctagttgctcagcgcgagctgcatgtcttgattcaggctgcctcaatatacaagaggccttttttttgtgataaactggtatcgatggttgtcctgac

SEQ ID NO: 705 - DNA, 9752 bp, Zea mays
  source 1..9752: mol_type = genomic DNA
gcccaaaaccatacccgcgaagaaaaaatacgctcgctaaaaactccatacccatgacgggtataaaatttttgcccaaactcatacccatgcgggtttcgggtaccaaacgggtttcccatacccactaacatcaacataaaaaataattcatcatgtaaatgacaatcaatacattaataagctagcataaaaggaacaagtgataactaattttagcctaaaatttgttacatgaagtttatttcaattagaacatattcaattaataatattatgagacatatttataaggaatgttgattttaagacggatttaaaaaacccatgggtttgcgggtatgggtagtggaagaacaaacacatgcccatgtacccgttggatttccatttaaacccattaacaaacccatgggtagagaaattaactcaaacctataccataatagagaaaacacaccgggttttaggtagcgggtacccattgctatctctagtgccggcatgcagcagaaggagggcgcaggctcctgggccgtatcgtcgatcacctgcgctgcgcatggaagtggtcaagtggagcagccgagcagggcagcaggcaggcaccccactgcacgtcctgccttttcccaccagccgcaaaccgcgcggaaaaagagcctgcatgcggcccctgcatgcaccgtacgtgatcacctgccagtgccactgccaggcagccagcccccgaccagctgctccctccctgcagcgtcgcctgctgccccggccggccatgtggcctgcttccagtggcagctacgagtacgtgcacacgcgcggcggagtagcggagagaggacggacgcgcccgcgcgcgcgagagagaggttgtctttaatttcgtcggcaccgtacgtccatcgtccatgcatgcaggcacgcacacccaccggcaccagacaagccaggggcggtcccactcgatcgtccatgcactgtgtatgtaatcgtgtcgcgcatgctggatcgccgacgtattcacctactcctacgtgtgagcgagcgagcgagcgcatgagacaagacgagacgagagcctgaggaagtgaggaggacagaaacagatgctgctgtgctgcgctgcgcgcgcatatgcaatgcacggtgccgcgatcatccgtcgcacaccgaattgctacaaacccattagtcatggactcagtcgctaagccgcccgtacggacaaactcacagacacacagagatcgcggtaaagctagcgttgcggtgagggagactctgagacgacggcgtcggcgtgcgtgctccacgcaacggctcatggctctagggtttcctctccgcctacgcctatatagcggcactctctccccgcccacctgctcaccctctctcctctgatctccctggttcctacccactgccaaggaaaaaccaccaaccccagacccagccagaggcctctgcctcagcccgtcttcttcttcttctcccatggcttaccgcggcggcggcggccggggaggaggaggccgcgacggggaccagcagcgcccgccgcacgtccacggacgaggagccggggggcccggaggcggccgcaccttcgtctggcctccaccgccttcttccacgccgcggccggtgccgccgtaccaccaccaccaccaccaccaggtgcccatgggctaccgcgcgcccatagtgctgccgcaccaggccgcgtacggggtgccgatggccgtgtaccggggggcgccggcgcccgcgtacagggtgcccgcgccagcgtcccctcggcctcgcgtctccttctcgcctgcgcctccggcgtctccggtcactatcagggcgccgccgccatcaccgacgacgccgccagctgctcccaccactccggcgcctccacgccagcccgcgcccgcgcccgcgcccgagccggccccggccccgccccccgcgccgtcgctcgcggccctggcgaaggaggtcgagaagaagctcttcgtctccgagaccgcgctggcgccggccgcggcggcggcagcggcagcggcagcgcagggcacagctggtgccggcgctgacgacgcggcgtcggacgtcgacctggcgccggtctccaagaaggggctcgcgcacccggctcggccggccctcgccaccgtggggaggaatgtgtttgtccgcgcgaaccacttcctcgtccacgtcgccgacaacaacttgttccactatgatgtgagctagccctcctctcgcctcatgcactagcagtgtatatcttctcgtatgtatccatgcatgcttgttgcttcgtaagatatggtagtagtcgtcttgtgcgcgcgcatgagttgtcagctgggagatatgggcgggtacgtactttgtgacgtaaaaattacacatgcagcgtgcgcgcgatggtccgctctcgttttttgtttcttttttttctttgatccgtctgatccagtgtttctgctgcttgttctcgtggttcctcgttggctgtgtttcttgcgaagaacaatccagtaccctcctgccactatatatatgcagtggttggatcggagctcacgttcatctgcgccaaaaataaagcatgcgcgcggcgtctctctttgcttgggattcttgaccatatggtgctgttgcatcgcggtgatgggactgctattcatctggccacctctctggctctaccgttcatgacagcttgttctgtagtccttctctgcaacgatttttctgctcttttgttttcggactgtttcgtatcgatcgcgtctgctggagctgcatggtgcgtgttctttggttggctgtcgtttgagcgcaagctttttcagctttcagcagtagtttctctctctctctccctccctcttttcggatcttttgtgtttttgttttgaaactagctatggacctatatggtttctcgcactgtcaaattaaatctgtctctcggctctcagtgagcctctttgtgccgtgcaacaaatacgtctaaacgttccatcgttgcgcagagaggccccagctgctgtcttgaatcttgatctcttctcctttctcgttcattttcctttctgatttgtcagatgcattttttttgctgcctggttttaattagtttttttttcctacttgagcttgattggtatacatacatggaacttgctttcagttccatacgcgcgtggttcttgcttgtgtgagaaatgcatcgccatgcatgcataatccctgccaaatgccatgggagtagacgcttttgatgaaacagctgctgcaggcggcttgcatggcagtacaacttgttgctttttgtttgtttttcttctttgcgatctggtcagatccattgtgggggtttctacagtgacccttcaaatctcgtgcagcataacctggccgtgcagcagcatatggttccaaattaagtttctgtacgagagcgggagattctttgtgttgcttctttttggaacttctcttggagttttctcgatcatggtcgattatattggctacacagcaaattaccatatccttgtctacgccagtaacttttctttgacacgtaaatgaccgatgcttttcgaagcgttttacatgtgtgagttctttttttccccaattattactagtagtcaacgtagtgtgtatctttaagattgtgattttattttcactgccgtaaatgtgtgaaaggaaatgcttcaggttaaagcttttttaaataatgacctgtttgtggggactgaaaaaaataatggcatatttgctatacacacttcgtcgtccccctgccccattttaaacactttgctattacagcttcacccttcccacactcagcgccagcaaaaaaataatgcaaaaaaataatatagaacgaacacttaaactcatacacatctgctccagaaatttaaagctaaccatcagaccacacatcttattgtttaaaaataaacaataattatatttgtaacgtagatgtcactcccacgctctcccgattcgtggcaagcgtatgtacacataactagtagcaatatagaagaaccctagtcaattgactccctgcgactgccagattgggtcattttctagcccacagtccacaccgctggcgctggatccccatggcagcgtcgcaactaaactggcgtaacaggctccgctgcacaaagcaaccaataccaccaccaacaacaacaacaacaaaatgcaaatcctcttcaacccgacattaggttaattggcttgtcaatccacccagaacttggcaatttccttcgcacttcactgtaagctgctttgattttcttaaccctagcaccaactagtgtccgctttttggctccccttaatatggcaaactttcttattccctgaccgcgcttgtatcttgaacattatgaatatataatcaatcaggtggggattcttcgtcccccccgttgcatgtttcaaaaaaaaaaaatcttaaccctaggataagtggatgtttgtttgggattataatctatctagattatataatccaataatttttgaactaagagttagttcaaaagttgttggattatataatctggatagattataatcccaaacaaacaccccctaagtaacttgcaatgctgtcttgtttatcgaatctaggacgagaatttcattatcctttcactaaggattctgactttttttagtgtttatacctttgtgctctaatgtgtgaaaccatgatccagttaatctcaataagaatattatgattcattttgcctggtggtttatgtctttaggtcgctattaatcccgagtcaaagtcaagagcaacgaacagggaagttctcaatgaactcatcaagttgcacgggaagacatctctgggcggcaaattgcctgcctatgatggcaggaagagtctctatactgctggttcacttccttttgaatcagaggagtttgtggttactcttgttgatcctgaaaagaaggagaaagaaaggtcttcccagatcctatgtcaggccatttttcagtactacacgaaagacatttctcacctgctcatattaatccttttcaatttatagggtggagagagagtacaaaatcacaattcgaattgccgggagaacagatttctaccaccttcagcagtttctgcttggaagacagagggatatgcctcaggaaaccatacaagtacttgatgttgtcctcagggagtcgccgtcttggaagtataatacctacactcaagttcttgctctgaattttgtttgagtaatcttttacccagggtactgacaactctttggtaaaaaaattgtcactgcagttatgtcacagtgtccagatcctttttctctacaacttttggtcacagaggtgatatcggtgaggggcttgagtgttggaggggttactaccaaagcctgcgcccaacacaaatgggcctttcgctgaatataggtaataccctgtttatgtcgttgttcctcagcaaaaaaatgtttttgttggtctatgccttttgtttgatatattttggtaattaactttggttataatgttgccttttcagatatttcagcaacatccttttttaagcctgtgacaattatcaaatttgtggaggagttcctgaacctgcgtgatacatctcggccgttgtttgacagagatcgtgtgaaggtattttttacacaatgacaatcgcgataacttcttttatagaacttgtacagcacgccatcctagagaaatcttgtatggctgtaactgtgttcagataaagaaagcattgcgcggtgtccgaattgaaacaactcaccaacaggaccaaatcagaagatacaagataacagggattactcccatccctatgagccagctgatgtaagtatttatctgcaaatgatactcttcttttctgttctctctacagcattttctgtaatattaatatcaatattaattctggttttctgaattgctagtacatctcttactaactgctaaatagttgtagtattacagttatcacaatttgaacgatctgacctatgtcaacagtgccataaacttatttttcctttttgtcattgtcatcaactgaccgcttcttttttgtcactttagattccctgttgatgataaaggaacaagaaagactgtagtgcagtacttcttggacaaatatgactacagattgaagtatgtctcttggccttgccttcaggctggcagtgattcacgacctgtatatttgcctatggaggtactgtgtccatgatcattcagttgtacctgaattattcatgttatgttcatagtttcaataaaaatggttgtaggtttgcaagattgtagaagggcagagatactctaagaagcttaatgacagacaagtgacgaacatacttagagcaacttgtaaacgtccccaggagagagagaagagcatacgtgatgtatgcttctagacctttattcctctgctgtttttagaataattattatctcttttggatatcatttttattgacattttttatgtgctgcatagatggttctgcataacaagtatgcagatgataagtttgctcaggagtttggcatcgaagttagcagtgatctagtgactgttccagcccgtgtgctgcctccacccctggtaaaattgctaagttcttttttgcaaaatgtgtgtccatgaatcacttttgttttattatttgaggaataatcaatttctttgttgtatttcagttgaaatatcatgactctggtagggagaaaacttgtgcaccaagtgttggacaatggaacatgatcaataaggtgacactatgttcttacttagaaatttatctctgatgttagttgagcattgccatcgttgtcaataaatttattgtgaacttgtccagcatcatcatgcactggttgtcaagcttttatgagtgtttgtttttctttaatgttgaaactattatcgccatttttctagaccagtctttttaacactgttctggtaccctttcccagaaaatgatcaatggtggaactattgataactggacttgtttgaacttttcacgcatgcgccctgatgaggtacaaaggttctgtatggatctgactcatatgtgcaatgccactggaatggtaagttttttactatttgtatgtgttatcaagttatgccagatagttcactatatatactgtagtttttacttctaatcatctctgtaggttgtcaatccacgcccatttattgaagtccggtctgctgctcctaaccatatagagaatgctttgagagatgtacacaagagagccacccaaatacttgcccaacaagcagtgggaaatcagctccagcttttgattgtaattcttcctgaagttagtggttcttatggtatgcatacttgcctcttgttctgggtcatacacaccttacagtttattagaatttttggtatataaatgactcctacttttgcaggtaaaattaaaagagtctgtgagactgacattggaattgtatctcaatgttgcttgccaaagcatgctagcaggccaaacaagcaatatttggaaaatgttgcactcaaaatcaatgtcaaggtctctcaatacctatattttttacattatgcttttttttattttggttctttcctgcaggaatgtaacaattcctttcgtcgagcaggttggtgggcgtaacacggttcttgagcgagccttttcacacgatggtataccttttgtctctgaagtcccaacaatcatctttggcgcagatgtcacacaccccccaccaggagaggactctgcatcatccattgctgctgttagtttcttcttaatcaatcataatttggtgcaatctgaactatgaaaaaataagttatcatgttgctaacttcaaacattcaaattgtgcaggtggtggcatcaatggactggcctgaaatcaccaagtacagaggtctggtttctgctcaaccacaccgacaagagataatagaagatttatttactgtcagtaaagatccacagatggggcacaacgttaatggtggcatgatcaggtaaggttttttattgatttgagttgacctattgaaagttgtcgaatggttcatctgggtaactggcattgcagggaactactgattgctttccgcaagaagacaaacagaaagcctgagaggataatattctataggcatgtgttccagattcctgtttttggttcatttattgtatgctgttgagtgaagtatgttgacttatcactcctatgcagggacggtgtaagtgaaggtcaattcagccatgttctccttcatgaaatggatgctatcagaaaggtatgatttccagcatcagaatttgtcggtgaaatatggttttcattgccatgcccatgtcaatggttttgtccctttccatttcaaggcttgtgcttctttggaggagggatatctacccccagtgacgtttgtggttgttcagaaaaggcatcacacaaggcttttccctgaggttcacggaaggcgtgatatgactgataaaagtggaaacattcttcctggttagtgtttttgtgtcacactgttattgggttcataaagctgctgcttctataagcatttgctgtctgggccttattttgcgcgtcacttgtgctgcaggaactgtggttgaccaaatgatttgccaccctactgagtttgatttctacttgtgtagtcatgctggcattcaggtacgttgcacattcttttccagaatagcacttgtcagacattgagtgtcaaaaatatttcttgtcagggaacaagtcgcccgacccattaccatgtgctctatgatgagaacgaatttactgctgatgcactgcagtcactgaccaacaatctttgctacacgtaagttcaactctccaatctccctccatctctgactctttgatttatctaacatctccctactgttacttgatgaaatgtgcagctatgctcgttgcacccgtgctgtatcagtgggtaagctcttattgcatctcctcttctgtgtcctatcataatctactcagctgaaccttttgttgatatgagctatttccttgtgagcttgaaacatgagaatttcaagctctttgatatgatctttaactgcaaaacgggggtagttcaatgagtgaacacattgacagcatttcttttaaaaagttgttgtattctcaacctgtgctatgtagattgatccattgaaataaataatcaaggatattattgtcagctctaacacccatctttatctgttgggttcatgaatcagtgtttctttgttattattagcactattgtcgccctttacggctgtaactatcatatggacaactattttcttgaaccatgcatcatttcattgtgctcttttatgttgtagatgcaaaatagttggttaccagtcatcgctaatgtggtgttctttgctttccagtcccaccagcgtactacgcccaccttgccgcattccgcgcacgctactatgtggaaggagaaagctcagacggtggctcgacacctggcagcagcgggcagacagtagcccgtgaggggcctgtcgaggtgcgtcaacttcccaagatcaaggacaacgtgaaggacgttatgttctactgctga

SEQ ID NO: 706 - DNA, 3893 bp, Zea mays
  source 1..3893: mol_type = genomic DNA
aagcctgcacagttgggaacgcctgatttccctgtgcccgcgtatgcaggcaagaggccgctttttcactatttggggccagcatatgagagctattcgagcatccaaacaaccttgtttgcactaccagagactgttcacggagttgtgcagcgtaccaaacgcacccataaactcggtttttccatgttccaggttcaggcagctcctaaaatttataaactgctcccaggccgtccaggtcttatgtttgaggatcctttcttcaactggtttagggatgacacagatgaacaatggaccaggacaattgattttactccatcagctagcatcgggcaatcatctattttatgtctggaggtgccacaacagtgtgagcttccaagaattggcgactactttgtttactataaagagcagaatcttgactttgaatgtcggaatgggtattcatattcctgtggtagcaaccttgtaccaattgtgaaatctcctgattacatagaggtcccttatgagatactcttcaaaatcaaccatttggttcagaatgggacactcagtgggccaacagttgatcatagtttcttccgtcatgttagcccaaaatttgaacctattgatcatataaaacgagcacttttaaagatgacatatttgaaaagcacctgcttgaacccaacagattggttatctgtgcaatactccagaatacggaaatcacgccatgcatcacaaaagttatctaatatatctctggatgatggcttggtctatgtccacagggtgcaagttacccctgctaaagtgtatttttatggacctgagataaatgtctccaatcgcgttgtgcggcatttctctgcagacatagataacttccttcggatttcatttgttgatgaagactgtgagaagctccgttcagctgatttgtcacctcgatctacttctggaaatgatgcaaggagaactgctctgtataatagagttttgtcagtcctttcaaatggcatcaatattggtgacaagcactttgagtttcttgccttttcttcaagtcagcttcgagataactctgcatggatgtttgcttctcggcagggattgactgcgagcgacataaggaagtggatgggggactttcgagatatcagaaatgtggcaaagtatgctgcaagacttgggcaatctttcagttcctcaacagaaactttaaaagtacacaaatctgaggtggaacgaattcctgatattacaaatggcacaaagtacatattctctgatggagttggaaagatctcagctaattttgcagtggaggtggctatgaagtgcaaattgaaacgctttgctccttctgtttttcagataaggtatggcggttacaaaggtgttgtcgctgtagatacaagatcaaatcataagctttctttgagaaaaagcatgtcaaagttccagtcagaaaatatcactcttgatgtccttgcatacagcaagtaccaaccatgcttcctgaatcggcagttgattactcttctctcaacacttggggttagcgataatgtctttgagctaaagcagaaggaagccttaaggcagttgaacagaatggtaactgaaccacaggctgctcgtgaagcagttgaacttatgcccatgggagaagtaaccaatgtagttaaagaattgttgtcatgtggctaccagcctgatcatgagccatatctttccatgctgctacaaacttttagagcatccaagcttctagagttgaaaacaaagtcaaggatattcatcacacaggggcgagcaatgatgggttgcctggatgaaacctgcacacttaagtacggccaggtattcgtccaagcttcttacagtgcagatgaccatcgcaaggtcgttgtaactggaaaagtagttgtcgccaaaaatccttgtctccaccctggtgacatacgggttctccaggctgttgatgttcctgctctgcaccacttgtttgactgtgttgtctttccacagcagggaccaaggcaagtgtttaacaatatattgtcatatgttttctagtaaatttcaacaggctcttatcttggaacatgtaatttcttggtttagtatgtttgtaccaattgaaacctgttgtccattttgccttaagtggatattaatcctattgtgacattttatctctaaaccagtttttaattctggtatgcatgaatgcaggccgcaccctaacgagtgttcagggagtgatcttgatggggacatatattttgtttcttgggatccacatcttattccgagtcgtttggtggatcctatggactatactccagcttcagcagaaacattagaccatgatgtcactattgaggtattttctagttgaaaccatccatcttcccttccgtgccattgatgctagcaattattctgttggcatcaatgctgtcatttagtttgtgttggtcaatgcgttgctttctatttggcctgattctcgttctcctgaacaacgaagttcaaagttttatttctcgtaggatagtttactttctttgctcgtggtggcagcagttatatgcaaattaaacagatagaattaacttcaacttatgaacaaatctcataccatgctttgaaatgatcaatcttgttattttgttcaggagatacaggagtacttcacaaactacatagttaatgagagtcttgggattatcgccaatgcgcatgtggtctttgcagatcaggaacgtatgaaggctgagagtccaccgtgcgttcaactggccaagctcttctctatagctgtcgatttcccaaagactggagtgccggctctgattccacatgagctacatgtcaaggagtatcctgacttcatggagaaactcgacaaagtcacctatgaatcaaagggtgtgatcgggaagctctatagggaaataaagaagcacacaccacacataaagcacttcacgagggaagtggcaaggcggtcttatgacaccgatttgattgttgatggctatgaagattacattactgaggctatagagttcaaggaagagtacgatttcaggctgggtaatcttatggaccactatggcataaaaagtgaagctgagataataagtggatgtattctaaagatggcaaagaatttcaccaagagtagtgatgctgatgcaattagaatggcggtgagatctttgaggaaagaagctaggtcgtggttcaatgagatgagcacaggagaggatggccaagatgccatggaggccaaggcctctgcttggtaccatgttacttatcatcagcagtactggggcagctacaatgaagggtatgatcggccgcatcttattagcttcccatggtgcgtatatgacaagcttgtggccatcaagcaggggaggaatctcctcacgcggatggatcgaaacttgaggttccgttgagcattgccagcaggtttgctcctgtacatatccctgatcgtttgcactcagcactgccagcaagtgtgcatgaacgatctgatgaattaagacgggcaaactgccgcaagctgacgctctggcctacgtgcgtcttgaaactttcggatgctgccgtctaactaaatgcatgttccttgatttccactgggaccttgagtttgaagtgtgtaaatatgctgcttatgatgtttttagtattggacctctatcaactgccgttctagttagtaacaatggttgccagtcatggattaccaggtttcgccgagctcctgtatggacgaccacgaaggtctatttcttccattaccaagtgcgaagtgtcacatctaacttgcgtagttgcattcaccttttttctcaaaaaaaaaa

SEQ ID NO: 707 - DNA, 8908 bp, Zea mays
  source 1..8908: mol_type = genomic DNA
accggccatggactgcggcgccgatgacggcttcgtcgccgagatcgaccggatactcgagagcatcaacgccgaggccacccccgcaccgccgcctcctcctcctgcgcctgcgcctgcgccagcgccagcgcctgtggctccgctgcagccacagccgcagttgcaggaggcggctgcgaccgtggcccacaatgcggtggcggtgtcggacgtggcgcagagggccccggccgtggaagcgaggaaggagcccaggagggagttcccggtcgccgcggccaatggcggcgacgactgcagggacagcaagcgccagcgtctccctgcgggtggtaccgggggaccacgccacgactggcggcggcgtccgatggcgcccccgcctccatcccgtgggtgggaggaccgggggcgcggaaggcgggagtacgacaggcctcgtaagcgcgaccgcgacggccactacggccaatgccatgatcaccaccgacgcgaccctcggggtttctgggagcgcgaccgcggcggcaagatggtgttccgccatggcatgtgggaggctgaggcggaccgccagggaaagcgtgccaggacgaaggatggatgccctcctgcggagaataaggcggaggtggatcggtcggggaaggagaagcctgccactgaggagaaggcgaggcagtaccagctcgaggtgcttgagcaagcaaagagcaggaacacaattgctttccttgaaactggtgcggggaagactctcatagctgtgttgctcatcaaaagcatctgtgacaaaatgctcaaggagaacaagaagatccttgctgtcttcttggtgcctaaggtgccccttgtgtatcaggtacagacacacgagtgagcctttggacattcaggtcgcaaattttgttgatacaattatattttcttggtggaattgcagcaagctgaagtgatacgcgagaggaccggctatcgtgttgggcactactgcggggagatggggcaggatttctgggattctagaaagtggcagcgcgagtttgagtcaaaacaggtaaaatcctgtgcgtggccgtacttttacttccaaactattttcagatacaatgccccatggccaagctttgatcaaacctgtgcttaggccacttgagttaggaactatagtgtagtactatgttgttgagctaactggttagtagccgagacacttgcattaagtctcattgtttctttgcagattatgaatttctaaaaaaattctttctctagatgtaaactagtagccgaggcacctgcattaaatctggccgtgcaggacgtaaactagttggatcttagtttctaagaagaaactataattgnnnnnnnnnnnnnnnnnnnnnnnnnnnnnnnnnnnnnnnnnnnnnnnnnnnnnnnnnnnnnnnnnnnnnnnnnnnnnnnnnnnnnnnnnnnnnnnnnnnnttcctgcaggtttaaacgattcgcccttggtctagagatgagctacgtcttgtctatggtgtttctgagcgtacagaaagcgatggtgcagctaatttaattcagaagttgagagctataaactatgctctgggtgaactaggacagtggtgtgcttacaaggtactgcttcacatcagtgaactagtgtattgatatctgtttcgtgtttctaactgctatatctgtttaacttcaggttgcactgtcattcttgacagcactacagaatgatgaaagggccaactatcaggttgatgttaagtttcaagagtcatacttgagaaaggtagttgatttgttacactgccagttgactgaaggggctgcaatgaaaagtgacagtaatgatgttgaaatgcataattctgaaaaccccaagccaaatgaacttgaggagggagagctacctgacagtcatggtattaatagtcttcttgcaaaatgtgttatatggtgacctttttctttttaacattccccaatgaatttcccttcttccttcactctacaattagcacatattgtgtttattttttgtcctttattataccttaggatatacaattagcacctattttgtttttttttgttctttattatacctgagggtatctcagcctcacttttaacgctttatgctgttatttcccactagctgtttctgtaggtgaacatgtagatgaagtcattggtgccgcagtggccgatggaaaagttaccccaagggtgcaagctttgataaaaatacttctcaagtatcagcacactgaggattttcgtgctatcatatttgtagagcgagtggttacagcattagtcctccctaaggtagggactatgttttcaacatcttaagatcaattacttctcaaccttttatgaattctctgacctgtttccctttcacgacggcttaggtctttgcagaacttccatcgttgggctttatacggtgtgcaagcttgataggtcataacaataaccaggagatgcggtcgtgccaaatgcaggatacaatcacaaaatttcgtgatggccgtgtatgtttctattcatgacgatgacatgatttaacatagtgtttgttgtggcacacaccttttatggtttaactatgttgttagctaggcttaacgatctgcattcagtggttttatgcaatctactaaattccatgatgtccaagtatgtttctactcatgacagaattctacattcatattttttgttccaagtacatgtctgttgtaagtttaaaactatgtttaactgtgtgctgtgtatatttacgattaaaacagatatgtccatgtacatatctgttgtacgttaggtgtatatattggagttgatctgtgcctcacagggtttttaaggcgtcgcctaggcgtccagtcgcttggctaaacctagccgccttgcccgcctagggcgccgcctaggcgctaaggcactcggagtgtttgcttgctcgcctaggcgccttaagaacactggtgcctcatacaccagctataaaaaatctctgttatgggtttgcaggttacactgttagttgcaactagtgttgcagaggaaggacttgatattaggcagtgcaatgttgtcattcgctttgaccttgcaaagactgttttggcctacattcagtctcggggtcgtgctagaaagcctggatctgactacatattgatgcttgaaaggtaattatgtgtcaccaaaactcttgataccgttaaaatatactccatttaaatcatcgacttatataaattaattctgccagaggaaatatgtctcatgaagctttcttgagaaatgctcggaatagtgaagagacattgagaaaagaagctattgagagaactgatctcagtcatctcgatggcacttctatgctaagccctgttgatatatcacctgattctatgtatcaggttgaatcaacaggtgccgttgtcagtctgaactctgcagttggactcgtacatttttactgctcacagctgccgagtgacaggtacataacttcttgtgatttgtttggtatactagctcaattgattttgaaatcgcaggctcatcagtagtttcctcattccagatactctattcttcgaccggaatttattatgcaaaagcatgagaaaccagggggttcaacagaatattcttgcaaacttcaactcccttgtaatgccccattcgagaaacttgaaggtcctatatgcagttcaatacgcctggcccaacaagtaatgacagttcactggaacaaaatattatttagttttttttccgtacattttatctattagtttgaactgtgactggttctttttgtgcaggctgtttgtttagctgcttgtaagaagctacatgagatgggtgccttcacagatatgcttttacctgacagaggaagtggggaaggagaaaagactgaacaaaatgatgaaggtgatccactgcctggaacagcacgccatagagagttctttcctgaaggggttgctgaaattctacatgtcagtattttcgttctcacattacctgagcttgaacttaacttaatggtgctttgcgaattgcgatctgccggtacttttaggttctgattagtttcatttcactaaactttgttttcaacagggagaatggattttatctggaagagatggttaccaaagttcacagtttattaagttatatttgtattctgtgaactgtgtaaacattgggacttcaaaggaccctttcgttacacaactttcaaattttgctcttatttttggcaatgagctggatgcagaggtaactttttcctggtgatattatgcaacttgagaaaataaacatttaaaatcctatgatgtttcgatgttttaggttttatcgacgacgatggatctctttgttgctaggacaataataacaaaggcatctctcgtattccgtggaccaattgaaattacagaaagtcaggttaattttctttgcaatgatgtatcaaagttcatttctattttttacattaaatgttgctaaacttgctcatgtgcttccagctgatcctgcttaagagctttcatgttaggctcatgagcattgtacttgatgttgatgttgatccctcaacaactccttgggatccagcaaaagcatacctctttgttcctgtgggagctgagaaatgtatggatcttttaagagagatagattggactctagttaatagcattgtgaattctgatgcctggaacaaccctcttcagagggcacgcccagatgtctatctaggcacgaacgaaaggacacttggaggggataggagggaatatgggttcgggaagttgcgccatggaactgcatttggacagaaagcccaccctacgtatggtatcagaggagccatcgctgaattcgatgttgtcaaagcgtctggattagttcctggtcgtggatggggacattttaatgattatcaaaataaaggcaagttgttcatggcagattcatgttgggatgccaaagatcttgctggaatggttgtaactgccgcccactcaggaaaaaggttctatgtggacagtatttgctataatatgaatgcagaaaattctttccctaggaaagagggctatctgggtcccttggaatacagctcgtttgctgattactacaagcagaagtaagataagttttgagtgctggaagcaaaaggagttctctcttagctctacctccttttgatttccctttttttttggcaaagtagctttatggcagcataccatgatgattcttgtttttcctctcaggtatggtgtggagttagtttataagaaacaacctcttatacgggcacgcggtgtttcatactgcaaaaatctactttctcctagatttgagcattctgaaggtaaaagctatgcatttcttttgtgagatttcttttagactttttttgtttgccttaatattttgctattcattgatgttttggtctttcaagcccatccaagacttcccagcactagattaatttaataaagaaatacaaacttagtgcttaatataacttatatacttgcaaatgggaaagtgtttggtataatggatttgtactactattgttttgcagctagcaatggagagttctcagagaatcttgacaagacatactatgtatatttaccacccgaattgtgccttgtgcatcctctccccggatcacttgttcgtggagctcagaggttaccctcaataatgagaagggtggagagcatgcttcttgcaattcaactgaaggacataattgggtatccagttcctgcaaataaggtacacttgcagctcccaatcgagcatgttttagggaaaacttttgaatgtcccccggtagaatttaccggtaaattgaacacttaaatttgtcctttctatattacacaactgtcttctactaagatgtcagactacatgccaactaagtggagcacccaatgacacctctaggccttcattgttgctcctagccttggtggatcgtgtctgttgacgggaaaaaattgttaaacaaaccaatatgtactcaatccaggtgctactgaatactaatgatagttttgtacatgataatatgcagggtaaatttaagggtctagtcttctgaaaagatcatgcttgtttgcctaatgaaaaaaatgtggagtgccataaacctgttctctattcacctagattcatcatgcaatagctatatgttattctgcacattgattaataattaatagctttttgtttgtgtggttcacagatattagaagccttgactgctgcgtcatgccaggagacattctgctatgaaagagcagagctgctgggtgatgcatacttgaaatgggttgtgagtagattccttttcctaaaatatcctcaaaagcatgagggacagctcacaaggatgcggcagcagatggttagcaacatgatcctgtatcaatacgccctgaataaaaacctccaatcttatatccaagcagatcgatttgctccatcaagatgggcagctccaggagtgttacctgtatttgatgaagaaacgagagattctgaaccatccatctttgatgaggaatttactcctagcagtgagttacaaaagaacttgtatgatgactatgatggcgatagcatgcaagaagacggtgaaattgagggagattctagctgctatcgtgttctatcaagcaaaacattagcagatgttgtggaagcacttattggtgtctattatgtagctggagggaaaattgctacaaaccatctgatgaaatggatcggtattaatgcagagttggatcctcaagagatcccatcttcgaagccatataacatacctgagagcataattaaaagcatcaattttgacacattagagggtgcattgggtatcaagtttcagaataaaggcttacttgttgaagctataacacatgcatcaagaccatcatcaggtgtttcctgttaccagcgcctggaatttgttggtgatgctgtattggaccatctcattacgaagcacttattttttacttatacggacctacctccaggccgcttgactgacttgagagctgcagctgttaataatgagaactttgcaagggttgcagttaaacataagctacatgtacatcttcgccatggatcatctgcattggagacacaggtgggccattcttaatgttcagtagtgaacttccttgctacccactccattccaaattattatttttatatgcatagctttttatgcacttagaaatacattatgtctagatttgtagtaaaaaacagtgtatctagaaaagctaaaacgccctgtaatttgaaatgaatggagtatgtgttacttatatatgctgtaatgtttgaactagagttctgtcatgttgaaaatattggcaccttttggaagcagtgctgactatattctctctatcctgtgaagattcgagagtttgtgaaggatgtccaggaggagctttcgaaaccaggtttcaattcttttggccttggggattgtaaggctccaaaggttctcggagacatttttgagtctattgctggcgcaatattccttgatagtgggtgtgctacctccgtagtctggaaggtagtttctgtgttctttggaatgaaattctgttcatactcatgtgggaaatactgaagtttaatttttttaatccatcatgtcaggtttttcagcctctgcttgatccaatggtgacgccggacacccttccgatgcaccctgtaagggagctccaagagcgctgccagcagcaagccgaaggattagaatacaaagcatcccgtacaggcaatgtagctacagttgaagtcttggttgatggcatacagattggtgtagctcagaacccacagaagaagatggcacaaaagttggcggctagaaatgcacttgttgtcttgaaagagaaggaaaccgcagcaaagaaagacactgaaaaggatggcgagaagaaaaacggttctcagttcactaggcagactctgaacgacatctgcttgagaaggcaatggccgatgccacagtacaggtgtataaacgagggtggccctgcccatgccaaaagatttgtttatgcggtaagggtaaatacatctgacagtggatggactgacgagtgcattggagagccaatgccgagtgtgaaaaaggccaaggactctgcagctgttcttctgctcgagctgctgaatcgaaattaccgtggcaagcctgatggaaaataatctttggtgatgttctgtggtggtaggtagacgtggaagcatccatcattctgattatacccccatgcagtgcttttcagcaaagcaaattaatggcctttgttgatgttcttggtggcggtattggtgatatggaggcattcaatgcaagcataagcagagctatggggagtgggattagaggattattattagttttgtctgaggtgactactaggtattttactggcgaggtactgaggtcacaactcacaaatagcagttgcaaattgcaatagaggaaatgatgataggttgatataggatattggaggcctcttattcatcgattgtataagatgtttacagaacagtgcattgatccattaaatttatattgattgatatttttatagtggtatactactaacggctttcttatatttcgtcccgctatgtattcagtggcttagatgtttacaaacatctcacattcatacacaggatgcgcctgcagctgggaactcggggttctctatcttggcctcgccgaccaaatatcacgtacgtcgacgtccgcgaacagtat

SEQ ID NO: 708 - DNA, 3984 bp, Zea mays
  source 1..3984: mol_type = genomic DNA
actcctctgcttcttagtacaggtgttgtaaccgcccaaacaattcctccgttcaagttagaactaggctggtttctgagggatggttttgtggatatggtaaaagatatttgggtaaatgagacaagaggttctactcctttggagaaatggcaagccaggattaggaaggtacgccaacacttaaggggttgggcaatgcacacttcggggttgttgaaaaaggaaaaaaaggagatcatcactaagcttgatgatttagataagagagctgaagtagttctgttgagtactgcggagttggatctgcgcaactacttacaaaacaggcttgctcagctactccgggaggaggaaataaagtggtatcaaagagcgaaggtcaaggagctcctggagggggatagtaatactaaatattttcagatgatagccaatggaaaattcaggaagaatcgaatcttccagatgacggatggagctcgtatgttatacgacgagggagaataaaaaagtcatataactagttattataaaaatctctttggccccccagaaagcacgtcttttactctggatgaggatcttagagatgatataatacaagttactcaagttgagaacgagaagctcacccagccattttctgaagatgaagtaaaagcggtggtttttagtatggaacataacaaggctccaggtcctgatggattcccggcggaattttatcaaatctgtaaagcagaggcgtggcgcggtggcgtcgacgtcttcttcggggtcgtgtgaggcgctcaacctatcgcaacagagacgacgaagggataggcgagagaggatggagaggggagaggaccacggagattggttggagcgcaacgcgacgcgggcgggcgaacgatggcggaggatgcggatgcggaggggaggaccatggaggatgcgtctgcccgaagcagagatcgaggagcattgatggcggggctcgtagatggcggatcgagggtgcgttgatggcggccgcgctgcagggccccggatcgtaggatcggcgttaatggcggctggcatcgcggtgatggcggggagcagaggggcgggtgggcagagggatcggcagaaccaaaatgtgcacgcctacagtagcgtcttaagagtagtaaagattggtttgctatagggcttgaatatgttcaaaacctcaattctttgatcatacttggagcttgggccatctggaatcaccgcaaccgttgtgttttcaatggtgtgcagccttgttctagcatggtcaacaagtgggtcaaggaggagtcacctctggtgtagggctggagccagtggattagatagcatcctttccgctccagcgcactaatcggcgaccttctgttttgggtttccatggtcatgagtatagctgttcatactatcgttttatttctagctatcctttagtgcgtgtgggttcgtgtggcattgtatgaggtttttatcctcaccttttcttcttaatataatgatatgcagctctcctgtgttttcgaaaaaaaatattcaaaacccaactacaaaccaagaaatttcaatgttttagctgtaacaattttaaaataagtttctgccttcaattctattgtcatcattctggttgttttctctttggtttcttgagcaggttggaggaaaacatgaagtgcattgtttttgtgaaaagaatcattgtcgcaagagtagtagttcaaattctccaaaatctgaagtgccttgatttttggagatgtgagtttcttgtgggatgccactcggggttaaggaatatgtcaagggataagatgagttctatcattgaaaagttctcttcgggtgaggtataatctgaagtctgtccatccttaatagttcttgtcaggtttatctattatctccactaacaccagtatatatgtttatgcttcttgtgttacagcctttttcaatactttttttgcaggtaaaccttttggttgctactagtgtaggtgaggagggacttgatattcagacttgctgccttgttgtgcggtttgatctccctgaaactgttaatagctttatccaatcaagggggcgtgcccggatgagtaaatcgaaatatgtttttctcttggagaggtcattttcgtaacacccacccacatgagcacacacacccactcaccgattacactgttctaatttacacaaacctatcataatgctattaacattttccttgaatttagttccttgtttttggttctagaccttgaagctcttcattttgatatttactaggggaaatcattctcaggagaagttacttgatgattatattactggtgaaatcattatggataaagagattaacttgagaacatcaaatgatatgttcaattgccttgaggagaacatctatcgagtcaatgatactggtgcttccattagcactgcttgcagtgtatctctattacatcgctactgtgataaccttcctagagatatgtatgcaaaggatcatttattattctacccattttgtgtcatgggaatatcctagaataatttgatacatcttgttgcagtttttttgttccttccccatcattcttctttgttgatgacgtcgatggaatagtatgcaaattaattcttccaccaaatgctgctttccgtcaagtgaatggtcaaccctgtccatcgaaagatgaagctaagagagatgcatgcttgaaagcatgcatcaaacttcatgaactcggtgctttgacagattttcttctacctggccaaggctctagaaagattaaggtatcaacaacaaataattcagaaagcaacaaagacgatggtatggtcatcgttcattattcagaatataatgcggaaaatattggtaatttagcttaaacatattttttccattttcagatgaaagttttagggaagagctttatgagatgttaatccctgcagttctgagaccttcaagatgcaaactagactcctcgtttaagttgcatttctattacatagaatttattcccataccagcagatagacgatatcagatgtttggtctttttgtgatcaatcgccttccagaggaatctgaaaagttggatgttgaattgcatcttgctcgtgcgaggattgtgaaagcaggaattaaatatttgggaaagattgagtttaacaaagaagaggcactgtcttgcttatctgttcagatgccaacacaaaattttcagggagcaatgcctgacatgtcttttttcttttatcttacagatgatactcgcacacaattttcaagaaatgtttttgaaagttctcctggatagatctgagttcacaccatcttatattttgttggggaatgatggtgcattggacatggattcaacattttaccttttacttcccatcaagcagaaattctatggtgataatatgattgattggccagcagtaaagcggtgtttatcatcacctgcatttcaagatccaatgggtttgtctctgcatgattcatatttaccaaatgagtctttgaagcttcttggtggaacatacaacaaagctgatgtgattggcagtttggtctatactccccacaccgacctgtttttcttcgttgatgccattctggatggaacaaatgctaaaagtgagttgaacggtgcaacgtatgcagaacattttaaacaaaggtaaaatgatgaattatactccctccgttctattttatttgtcacgttttagttcaaaaatgaactagcgggcgacaaatattcgaaaaccgatgtagtatcttacatgccattcctagcttacattttttcttacaaatattgcaaaaatgtactataccatgttgagcgttgagaacaatgctgtatggtcttgtgacagtcagtgtgcgtgtgtgtgcctttcaggcacggtgtacggacatttttctga

SEQ ID NO: 709 - protein, 910 aa, Zea mays
MGSHDGEDEELPPPPPVPPDVIPIKAEDAVGESPANHILKPKRLLMDRPGIGRKGQPTQLYSNHFKVAVKSTEDVFFHYYVNLKYEDDRPVDGKGIGRKVIDKLQQTYRAELSNKDFAYDGEKSLFTVGGLPQKKNEFTVVLEDVSTGKTAANGSPGGNDSPGGGDRKRVRRPYQTKTFKVEINFAAEVPMSAIGQVIRGEESENSLEALRVLDIILRQHSAEQGCLLVKQSFFYNNPSCFVDLGGGVMGCRGFHSSFRGTQSGLSLNVDVSTTMIVKPGPVIDFLLSNQNVNDPSRIDWQKAKRALKGLRIRTTPANSEFKIFGLSERICKEQTFPLRQRNGSNGDCDTIEITVYDYYAKKGIDLKYSGDFPCINTGKAKRPTYFPIELCSLVPLQRYTKALSTLQRSSLVEKSRQKPEERMTVLNDALQRSNYDSDPMLRACGVSVAPKFTQVEGRILQAPKLKAGNGDDIFSRNGRWNFTNRKFYETCSVNKWAVVNFSARCDVRNLIRDLMRNASAKGIQMEEPFDVFEESPSMRRAPVSRRVDDMFGQIKSKLPGAPRFLLCLLPERKNCEIYGPWKRKCLAEFGIVTQCLAPLRVNDPYLLNLLMKINAKLGGLNSLLQVEASSSIPHVSQVPTIILGMDVSHGHPGQDRPSVAAVVSSRQWPLISRYRASVHTQSARLEMMSSLFKPRGTDDDGLIRESLIDFYTSSGKRKPEHIIIFRDGVSESQFTQVINIELDQIIEACKFLDEKWSPKFTVIVAQKNHHTKFFQTASPDNVLPGTVVDSKVCHPKNFDFYMCAHAGMIGTTRPTHYHVLHDEIGFSADEMQEFVHSLSYVYQRSTTAISVVAPVCYAHLAAAQVSTFLRLEEMSDASSSQGGGHTSAGSAPVPELPRLHDKVRSSMFFC

SEQ ID NO: 710 - protein, 633 aa, Zea mays
MGSHDGEDEELPPPPPVPPDVIPIKAEDAVGESPANHILKPKRLLMDRPGIGRKGQPTQLYSNHFKVAVKSTEDVFFHYYVNLKYEDDRPVDGKGIGRKVIDKLQQTYRAELSNKDFAYDGEKSLFTVGGLPQKKNEFTVVLEDVSTGKTAANGSPGGNDSPGGGDRKRVRRPYQTKTFKVEINFAAEVPMSAIGQVIRGEESENSLEALRVLDIILRQHSAEQGCLLVKQSFFYNNPSCFVDLGGGVMGCRGFHSSFRGTQSGLSLNVDVSTTMIVKPGPVIDFLLSNQNVNDPSRIDWQKAKRALKGLRIRTTPANSEFKIFGLSERICKEQTFPLRQRNGSNGDCDTIEITVYDYYAKKGIDLKYSGDFPCINTGKAKRPTYFPIELCSLVPLQRYTKALSTLQRSSLVEKSRQKPEERMTVLNDALQRSNYDSDPMLRACGVSVAPKFTQVEGRILQAPKLKAGNGDDIFSRNGRWNFTNRKFYETCSVNKWAVVNFSARCDVRNLIRDLMRNASAKGIQMEEPFDVFEESPSMRRAPVSRRVDDMFGQIKSKLPGAPRFLLCLLPERKNCEIYGPWKRKCLAEFGIVTQCLAPLRVNDPYLLNLLMKINAKVWDMILSFFCTVLFPGS

SEQ ID NO: 711 - protein, 560 aa, Zea mays
MGSHDGEDEELPPPPPVPPDVIPIKAEDAVGESPANHILKPKRLLMDRPGIGRKGQPTQLYSNHFKVAVKSTEDVFFHYYVNLKYEDDRPVDGKGIGRKVIDKLQQTYRAELSNKDFAYDGEKSLFTVGGLPQKKNEFTVVLEDVSTGKTAANGSPGGNDSPGGGDRKRVRRPYQTKTFKVEINFAAEVPMSAIGQVIRGEESENSLEALRVLDIILRQHSAEQGCLLVKQSFFYNNPSCFVDLGGGVMGCRGFHSSFRGTQSGLSLNVDVSTTMIVKPGPVIDFLLSNQNVNDPSRIDWQKAKRALKGLRIRTTPANSEFKIFGLSERICKEQTFPLRQRNGSNGDCDTIEITVYDYYAKKGIDLKYSGDFPCINTGKAKRPTYFPIELCSLVPLQRYTKALSTLQRSSLVEKSRQKPEERMTVLNDALQRSNYDSDPMLRACGVSVAPKFTQVEGRILQAPKLKAGNGDDIFSRNGRWNFTNRKFYETCSVNKWAVVNFSARCDVRNLIRDLMRNASAKGIVWFSFSHIFYCSSFLLLTFSSGSKWRNLLMCLKRVPL

SEQ ID NO: 712 - protein, 473 aa, Zea mays
MLKACGITIARNFTEVDGRVLQPPKLTAGNGEDIFTRNGRWNFNNKRLIRACSVEKWAVVNFSARCNVRDLVRDLIKCGGMKGIMVDAPFAVFDENPSMRRSPAIRRVEDMFEQVKTKLPGAPKFLLCVLAERKNSDIYGPWKKKCLAEFGIVTQCVAPTRVNDQYLTNVLLKINAKLGGMNSLLQIETSPAIPLVSKVPTIILGMDVSHGSPGHSDVPSIAAVVSSREWPLISKYRASVRTQSPKMEMIDSLFKPREAEDDGLIRECLIDFYTSSGKRKPDQVIIFRDGVSESQFNQVLNIELQQIIEACKFLDEKWNPKFTLIIAQKNHHTKFFIPGKPDNVPPGTVVDNKVCHPKNFDFYMCAHAGMIGTTRPTHYHILHDEIGFSPDDLQELVHSLSYVYQRSTTAISVVAPICYAHLAAAQVGQFIKFDEMSETSSSHGGHTSAGSVPVQELPRLHEKEGSSWYDVKC

SEQ ID NO: 713 - protein, 471 aa, Zea mays
MLKACGITIARNFTEVDGRVLQPPKLTAGNGEDIFTRNGRWNFNNKRLIRACSVEKWAVVNFSARCNVRDLVRDLIKCGGMKGIMVDAPFAVFDENPSMRRSPAIRRVEDMFEQVKTKLPGAPKFLLCVLAERKNSDIYGPWKKKCLAEFGIVTQCVAPTRVNDQYLTNVLLKINAKLGGMNSLLQIETSPAIPLVSKVPTIILGMDVSHGSPGHSDVPSIAAVVSSREWPLISKYRASVRTQSPKMEMIDSLFKPREAEDDGLIRECLIDFYTSSGKRKPDQVIIFRDGVSESQFNQVLNIELQQIIEACKFLDEKWNPKFTLIIAQKNHHTKFFIPGKPDNVPPGTVVDNKVCHPKNFDFYMCAHAGMIGTTRPTHYHILHDEIGFSPDDLQELVHSLSYVYQRSTTAISVVAPICYAHLAAAQVGQFIKFDEMSETSSSHGGHTSAGSVPVQELPRLHEKVRSSMFFC

SEQ ID NO: 714 - protein, 898 aa, Zea mays
MESHNGEADDLPPPPPLAAGVEPLKADETKMPLKPRSLVQRNGFGRKGQQIKLITNHFKVSLMKAEDFFYHYYVNLKYEDDTPVDRKGSGRKVIEKLQQTYAAELANKDFAYDGEKSLFTIGALPQVKMEFTVVDEDVSTGKTPANGSPGNDSPPGSDRKRVRRPYNTKTYKVELSFAAKIPMSAISQALRGQESEHTQEAIRVIDIILRQHSAKQGCLLVRQSFFHNNPSNFVDLGGGVVGCRGFHSSFRATQSGLSLNIDVSTTMIVKPGPVIDFLIANQKVNDPSMIDWAKAKRSLKNLRIKTSPANQEQKIVGLSDRPCREQLFTLKHKNGESEEITVFDYFVKNRGIKLEYSGDLPCINVGKPKRPTYFPVELCSLLPLQRYTKALSTLQRSSLVEKSRQKPQERMSVLSDVLQRSNYDAEPMLKACGITIARNFIEVDGRVLQPPKLKAGNGEDIFTRNGRWNFNNKKLIRASSVEKWAVVNFSARCNVRDLVRDLIKCGGMKGIMVDAPFAVFDENPSMRRSPAVRRVEDMFEQVKTKLPGAPKFLLCVLAERKNSDIYGPWKKKCLAEFGIVTQCVAPTRVNDQYLTNVLLKINAKLGGLNSLLQIETSPAIPLVSKVPTIILGMDVSHGSPGHSDIPSVAAVVSSREWPLISKYRASVRTQSPKMEMIDSLFKPRETDDDGLIRECLIDFYTSSGKRKPDQVIIFRDGVSESQFNQVLNIELQQIIEACKFLDEKWNPKFTLIIAQKNHHTKFFIPGKPDNVPAGTVVDNKVCHPRNFDFYMCSHAGMIGTTRPTHYHILHDEIGFNPDDLQELVHSLSYVYQRSTTAISVVAPICYAHLAAAQVGQFIKFDEMSETSSSHGGHTSAGSVPVQELPRLHEKVRSSMFFC

SEQ ID NO: 715 - protein, 560 aa, Zea mays; identical to SEQ ID NO: 711

SEQ ID NO: 716 - protein, 473 aa, Zea mays; identical to SEQ ID NO: 712

SEQ ID NO: 717 - protein, 471 aa, Zea mays; identical to SEQ ID NO: 713

SEQ ID NO: 718 - protein, 296 aa, Zea mays
MEKRTRVGVGSETGTVVYSFGGNKDGHPLQGEYASFSDDNSGGWCLRDKVVGSRCWPLISRYRASVRTQSPKVEMIDSLFKPLDDGKDDGIMRELLLDFYQTSQQRKPKQIIIFRDGVSESQFSQVLNVELNQIIKAYQSMGQGDLPKFTVIIAQKNHHTKLFQADSPENVPPGTVVDSGIVHPRQYDFYMCAHAGPIGTSRPTHYHVLLDEIGFSADNLQKLVLSLSYVYQRSTTAISVVAPICYAHLAAAQMGQFMKFEEFADTSSGSVNSSSPPSIPELPRLHADVCSSMFFC

SEQ ID NO: 719 - protein, 915 aa, Zea mays
MAPSSPSSARPTRASGRKRSAMAEEIHQNQEEEEEVVAASTAKRRRKAASSGKKPKPTPKQAKPAVAGMKKKGETEKTEPVVDDVCAEEPDEEELAMGEEEAEAEEQAMQEVVAAVAAGSPGKKRVGRRSAAASGDHVPEFIGSPVAAAEAHSNWPKRYERSTAANKPEEDDELKARCHYRSAKVDNIVYCLGDDVYVKAGENEADYIGRITEFFEGTDRCHYFTCRWFFRAEDTVINSLVSINVDGHKHDPRRVFLSEEKNDNVLDCIISKVKIVHVDPNMDPKAKAQLIEHCDLYYDMSYSVAYSTFANISSENGQSGSETASGISSDDAGLETSSNMPERTATLLDLYSGCGGMSTGLCLGAALSGLKLETRWAVDLNSFACQSLKYNHPQTEVRNEKADEFLALLKEWAVLCEKYVHQDVDSNLAGSEDQEDADTLDKDEFVVQKLIGIRYDGTGRKKGVYFKVQWEGYGPEEDTWEPIDNLSDCPLKIREFVQEGRKRKILPLPGDVDVICGGPPCQGISGFNRFRNRDEPLKDEKNKQMVTFMDIVAYLKPKYVLMENVVDILKFADGYLGKYALSCLVAMKYQARLGMMVAGCYGLPQFRMRVFLWGALSSMVLPKYPLPTYDVVVRGGAPNAFSQCMVAYDETQRPSLKKALLLGDAFSDLPKVENHQPNDVMEYGGSPKTEFQRYIRLGRKDMLDWSFGEEAGPDEGKLLDHQPLRLNNDDYERVKQIPVKKGANFRDLKGVKVGANNVVEWDPEVERVYLSSGKPLVPDYAMSFIKGKSLKPFGRLWWDETVPTVVTRAEPHNQVILHPTQARVLTIRENARLQGFPDYYRLFGPIKEKYIQVGNAVAVPVARALGYCLGQAYLGESDGSQPLYQLPASFTSVGRTAVQANAVSVGTPAGEVVEQ

SEQ ID NO: 720 - protein, 849 aa, Zea mays
MAPSSPSSARPTRASGRKRSAMAEEIHQNQEEEEEVVAASTAKRRRKAASSGKKPKPTPKQAKPAVAGMKKKGETEKTEPVVDDVCAEEPDEEELAMGEEEAEAEEQAMQEVVAAVAAGSPGKKRVGRRSAAASGDHVPEFIGSPVAAAEAHSNWPKRYERSTAANKPEEDDELKARCHYRSAKVDNIVYCLGDDVYVKAGENEADYIGRITEFFEGTDRCHYFTCRWFFRAEDTVINSLVSINVDGHKHDPRRVFLSEEKNDNVLDCIISKVKIVHVDPNMDPKAKAQLIEHCDLYYDMSYSVAYSTFANISSENGQSGSETASGISSDDAGLETSSNMPERTATLLDLYSGCGGMSTGLCLGAALSGLKLETRWAVDLNSFACQSLKYNHPQTEVRNEKADEFLALLKEWAVLCEKYVHQDVDSNLAGSEDQEDADTLDKDEFVVQKLIGIRYDGTGRKKGVYFKVQWEGYGPEEDTWEPIDNLSDCPLKIREFVQEGRKRKILPLPGDVDVICGGPPCQGISGFNRFRNRDEPLKDEKNKQMVTFMDIVAYLKPKYVLMENVVDILKFADGYLGKYALSCLVAMKYQARLGMMVAGCYGLPQFRMRVFLWGALSSMVLPKYPLPTYDVVVRGGAPNAFSQCMVAYDETQRPSLKKALLLGDAFSDLPKVENHQPNDVMEYGGSPKTEFQRYIRLGRKDMLDWSFGEEAGPDEGKLLDHQPLRLNNDDYERVKQIPVKKGANFRDLKGVKVGANNVVEWDPEVERVYLSSGKPLVPDYAMSFIKGKSLKPFGRLWWDETVPTVVTRAEPHNQVILHPTQARVLTIRENARLQGFPDYYRLFGPIKEK

SEQ ID NO: 721 - protein, 915 aa, Zea mays
MAPSSPSPAAPTRVSGRKRAAKAEEIHQNKEEEEEEEEVVAASSAKRSRKAASSGKKPKSPPKQAKPGRKKKGDAEMKEPVEDDVCAEEPDEEELAMGEEEAEEQAMREEVVAVAAGSPGKKRVGRRNAAAAAGDHEPEFIGSPVAADEARSNWPKRYGRSTAAKKPDEEEELKARCHYRSAKVDNVVYCLGDDVYVKAGENEADYIGRITEFFEGTDQCHYFTCRWFFRAEDTVINSLVSISVDGHKHDPRRVFLSEEKNDNVLDCIISKVKIVHVDPNMDPKAKAQLIESCDLYYDMSYSVAYSTFANISSENGQSDSDTASGISSDDVDLETSSSMPTRTATLLDLYSGCGGMSTGLCLGAALSGLKLETRWAVDFNSFACQSLKYNHPQTEVRNEKADEFLALLKEWAVLCKKYVQDVDSNLASSEDQADEDSPLDKDEFVVEKLVGICYGGSDRENGIYFKVQWEGYGPEEDTWEPIDNLSDCPQKIRDFVQEGHKRKILPLPGDVDVICGGPPCQGISGFNRYRNRDEPLKDEKNKQMVTFMDIVAYLKPKYVLMENVVDILKFADGYLGKYALSCLVAMKYQARLGMMVAGCYGLPQFRMRVFLWGALSSMVLPKYPLPTYDVVVRGGAPNAFSQCMVAYDETQKPSLKKALLLGDAISDLPKVQNHQPNDVMEYGGSPKTEFQRYIRLSRKDMLDWSFGEGAGPDEGKLLDHQPLRLNNDDYERVQQIPVKKGANFRDLKGVRVGANNIVEWDPEIERVKLSSGKPLVPDYAMSFIKGKSLKPFGRLWWDETVPTVVTRAEPHNQVIIHPTQARVLTIRENARLQGFPDYYRLFGPIKEKYIQVGNAVAVPVARALGYCLGQAYLGESEGSDPLYQLPPSFTSVGGRTAGQARASPVGTPAGEVVEQ

SEQ ID NO: 722 - protein, 595 aa, Zea mays
MTTLRCCEDFSMERLELLGDSVLKYAVSAHLFMTFLNKHEGQLSSRRQETICNATLYRLGIERRIQGYIRDAAFDPRRWLAPGQLSRRPCPCECPVNSEVVTEDIHRIDDKSIIIGKACDKGHRWICSKTISDCVEALIGAYYVEGGLKAAFAVLKWFQIETEIEEELIMEALSSASVRNYLPKVDVVELLEAKLGYTFQMKGLLIEALTHSSQQESGATYCYQRLEFLGDAVLDILITRHLFLSHKDTDEGELTDLRSASVNNENFAQVAVKHNLHQFLQHSSGFLQDQITEYVNSLESSSMDRASLLSSGPCRGPKVLGDIVESIAGAILIDSKLDLDLVWRVFKPLLSPIVTPENLELPRFRELNEWSDKNGYFIGIKCENRGDSTMAILNLQLKDLLLVRQGCGKNKVDAKAHAASLLLRDLEEKGLIIPRNASRVEQLEKNSGTVKHCNNVLDVMDTQNVAPPRQKEVAVLSTTTPGSVLDKPLVVKVKLSKGGPRISLYESCKKLQWPMPTFEFVKVEPSVCSSSCGSSQKVAPQGFAFASTITLHIPNGDVISLTGDGRADKKSSQDSAALLMLYELQRQRRFQVQEV

SEQ ID NO: 723 - protein, 1517 aa, Zea mays
MADAATSEDADLPPPPPPAQLPPPRRPHKRLQPRGYQVEVFAAALRGNTIAVLDTGSGKTMVAIMLAREHVLRARAGEALRRIVVFLAPTVHLVHQQFEVIREYTDLDAVECHGASGVGHWNAKRWKEAIGTKEIVVMTPQILLDALRHAFLTMRVMSLLIFDECHRACGNHPYSLIMKEFYIDSEWRPAIFGMTASPVSKKGASTIEDCEAQIAQLELVLDAKVYIVEDRNELESFSTGAKVVNKYYDPYLFDLDNLESKLQMLFEEVVKIYNESINTIDDSEDCVFSKESLNLQVSYFKEALFLIEDFLPQGYGELMKSESGSAELTKKGYISSKVESLINIFKSFGSSEEVLCMIFVERITTAKAVERFMRGNVNFSRFSISYLTGGSTSKDALSPAVQRFTLDLFRAGKVNLLFTTDVTEEGIDVPNCSCVIRFDLPRTVCSYVQSRGRARKSSSSYVLMIERGNLAQQEHIFRIIRTEYYVKTFALHKQPNTPSLDLPLQEKYIYHVESTGATITAECCVNLIYKYCEKLPKDRYYLPKPCFEVGLKDGSYQCTLTMPHNAAFRSIVGPPSSSCNLAKQLVCLEACKKLHELGELDDHLVPLTEEPMDIDTDTTDKKCVSGPGTTKRKELHGTINVHGLSGNWIHESETVILNAYTFDFRCDQEGELYAGFVLLMESVLDDDVARSEIDLFLIPNKMVYTTMTPCGKIQLNKEQLCKGKLFQEFFFNGIFGRLFHGSRTDELQREFIFTKGHEIQWGSDNMYLLLPLRNSSQIQHDPNIYWEAVESCSGTVEQLRNLYLEDGNLNHENLCSHKRSNKGEDIIHLANKSLHFSTVKDSVVLSLHTGRIYSVLDLILDKTADDSFDEMYNGKASPFASFVDYYHQKYGIVIQHPGQPLLLLKQSHNAHNLLFSKMKYQDGSTGNPLLVEKEQIHARVPPELLIHIDVATDILKSFYLLPSVMHRVQSLMLASQLRSNISYIQRIPSSLILEAITTLRCCESFSLERLELLGDSVLKYVIGCDLFLRYPMKHEGHLSDMRSKAVCNATLHKHGIWQSLQGYIRDAAFDPRRWVAPGQISLRPFPCNCGIETAFVPFNGGYISDDPSFVVGKPCDRGHRWMCSKTVSDCVEALVGAYYVGGGIAAAIWVMRWFGIDVRCDMELVQKAKYNSNASRMCYLSKIKDIEELEAKLKYNFSVKGLLLEAISHPSVQELGVDYCYQRLEFLGDSVLDLLITQHLYATHTDVDPGELTDLRSASVSNENFAQAVVRNNIHNHLQHGSGILLEQVTEYVRSNLEYHGKENQFLQQATCKAPKVLGDIMESITGAIFIDVNFDVDLVWKIVEPLLSPMITPDKLALPPYRELLELCSHLGCFIESKCTSEGEELIIEMKVQLRDEQLIAQGHDRNGKTAKANAAARILVDMKKRGLSLKQCISKANQLDIVSSKLQSELTNLESRHDCPHMNGTLSLGLSSARAAVVLPLKMDKGGPRTALFRLCKSLQWPIPEFEFVEQRFRY

SEQ ID NO: 724 - protein, 1440 aa, Zea mays
MADAATSEDADLPPPPPPAQLPPPRRPHKRLQPRGYQVEVFAAALRGNTIAVLDTGSGKTMVAIMLAREHVLRARAGEALRRIVVFLAPTVHLVHQQFEVIREYTDLDAVECHGASGVGHWNAKRWKEAIGTKEIVVMTPQILLDALRHAFLTMRVMSLLIFDECHRACGNHPYSLIMKEFYIDSEWRPAIFGMTASPVSKKGASTIEDCEAQIAQLELVLDAKVYIVEDRNELESFSTGAKVVNKYYDPYLFDLDNLESKLQMLFEEVVKIYNESINTIDDSEDCVFSKESLNLQVSYFKEALFLIEDFLPQGYGELMKSESGSAELTKKGYISSKVESLINIFKSFGSSEEVLCMIFVERITTAKAVERFMRGNVNFSRFSISYLTGGSTSKDALSPAVQRFTLDLFRAGKVNLLFTTDVTEEGIDVPNCSCVIRFDLPRTVCSYVQSRGRARKSSSSYVLMIERGNLAQQEHIFRIIRTEYYVKTFALHKQPNTPSLDLPLQEKYIYHVESTGATITAECCVNLIYKYCEKLPKDRYYLPKPCFEVGLKDGSYQCTLTMPHNAAFRSIVGPPSSSCNLAKQLVCLEACKKLHELGELDDHLVPLTEEPMDIDTDTTDKKCVSGPGTTKRKELHGTINVHGLSGNWIHESETVILNAYTFDFRCDQEGELYAGFVLLMESVLDDDVARSEIDLFLIPNKMVYTTMTPCGKIQLNKEQLCKGKLFQEFFFNGIFGRLFHGSRTDELQREFIFTKGHEIQWGSDNMYLLLPLRNSSQIQHDPNIYWEAVESCSGTVEQLRNLYLEDGNLNHENLCSHKRSNKGEDIIHLANKSLHFSTVKDSVVLSLHTGRIYSVLDLILDKTADDSFDEMYNGKASPFASFVDYYHQKYGIVIQHPGQPLLLLKQSHNAHNLLFSKMKYQDGSTGNPLLVEKEQIHARVPPELLIHIDVATDILKSFYLLPSVMHRVQSLMLASQLRSNISYIQRIPSSLILEAITTLRCCESFSLERLELLGDSVLKYVIGCDLFLRYPMKHEGHLSDMRSKAVCNATLHKHGIWQSLQGYIRDAAFDPRRWVAPGQISLRPFPCNCGIETAFVPFNGGYISDDPSFVVGKPCDRGHRWMCSKTVSDCVEALVGAYYVGGGIAAAIWVMRWFGIDVRCDMELVQKAKYNSNASRMCYLSKIKDIEELEAKLKYNFSVKGLLLEAISHPSVQELGVDYCYQRLEFLGDSVLDLLITQHLYATHTDVDPGELTDLRSASVSNENFAQAVVRNNIHNHLQHGSGILLEQVTEYVRSNLEYHGKENQFLQQATCKAPKVLGDIMESITGAIFIDVNFDVDLVWKIVEPLLSPMITPDKLALPPYRELLELCSHLGCFIESKCTSEGEELIIEMKVQLRDEQLIAQGHDRNGKTAKANAAARILVDMKVYLFKQKQNIKKCLV

SEQ ID NO: 725 - protein, 1199 aa, Zea mays
MKSESGSAELTKKGYISSKVESLINIFKSFGSSEEVLCMIFVERITTAKAVERFMRGNVNFSRFSISYLTGGSTSKDALSPAVQRFTLDLFRAGKVNLLFTTDVTEEGIDVPNCSCVIRFDLPRTVCSYVQSRGRARKSSSSYVLMIERGNLAQQEHIFRIIRTEYYVKTFALHKQPNTPSLDLPLQEKYIYHVESTGATITAECCVNLIYKYCEKLPKDRYYLPKPCFEVGLKDGSYQCTLTMPHNAAFRSIVGPPSSSCNLAKQLVCLEACKKLHELGELDDHLVPLTEEPMDIDTDTTDKKCVSGPGTTKRKELHGTINVHGLSGNWIHESETVILNAYTFDFRCDQEGELYAGFVLLMESVLDDDVARSEIDLFLIPNKMVYTTMTPCGKIQLNKEQLCKGKLFQEFFFNGIFGRLFHGSRTDELQREFIFTKGHEIQWGSDNMYLLLPLRNSSQIQHDPNIYWEAVESCSGTVEQLRNLYLEDGNLNHENLCSHKRSNKGEDIIHLANKSLHFSTVKDSVVLSLHTGRIYSVLDLILDKTADDSFDEMYNGKASPFASFVDYYHQKYGIVIQHPGQPLLLLKQSHNAHNLLFSKMKYQDGSTGNPLLVEKEQIHARVPPELLIHIDVATDILKSFYLLPSVMHRVQSLMLASQLRSNISYIQRIPSSLILEAITTLRCCESFSLERLELLGDSVLKYVIGCDLFLRYPMKHEGHLSDMRSKAVCNATLHKHGIWQSLQGYIRDAAFDPRRWVAPGQISLRPFPCNCGIETAFVPFNGGYISDDPSFVVGKPCDRGHRWMCSKTVSDCVEALVGAYYVGGGIAAAIWVMRWFGIDVRCDMELVQKAKYNSNASRMCYLSKIKDIEELEAKLKYNFSVKGLLLEAISHPSVQELGVDYCYQRLEFLGDSVLDLLITQHLYATHTDVDPGELTDLRSASVSNENFAQAVVRNNIHNHLQHGSGILLEQVTEYVRSNLEYHGKENQFLQQATCKAPKVLGDIMESITGAIFIDVNFDVDLVWKIVEPLLSPMITPDKLALPPYRELLELCSHLGCFIESKCTSEGEELIIEMKVQLRDEQLIAQGHDRNGKTAKANAAARILVDMKKRGLSLKQCISKANQLDIVSSKLQSELTNLESRHDCPHMNGTLSLGLSSARAAVVLPLKMDKGGPRTALFRLCKSLQWPIPEFEFVEQRFRY

SEQ ID NO: 726 - protein, 609 aa, Zea mays
MAHWVSDSDGSDNFEWDSDGNGEEPANFNAAGAGSSALRSTNTDAPGPSTRVANGNGKAGPSASLVQKYMDMGFTEEIVRKAMKDNGDNGADSLVELLLTYQELGNDLKVDNGFASGCAPQTVDDSDDDDILENWDDEDADGGRSTRVANSIDDSEDEDFLNEMSQKDKKVDSLVKMGFPEDEAALAITRCGQDASISVLVDSIYASQTAGDGYCGNLSDYEGNSNGGRNKGRFMDGNKKKRKRYGGQAQGNRGPLDGSCEEPMPLPNPMVGFNLPDHWTRPVDRSLPTQAIGPPYFYYENVALAPKGVWTTISRFLYDIQPEFVDSKYFCAAARKRGYIHNLPLERRSPLLPLPPKTIFEAFPRTKRWWPSWDPRRQFNCLQTCTSSAKLLERIRVTLANSSDPPPPLVQKFVLEECRKWNLAWVGLNKVAPLEPDEMEFLLGFPKDHTRGISRTERYRSLGNSFQVDTVAYHLSVLKDRYPQGMNVLSLFTGIGGAEVALHRLGIRMNTVVSVEKSEVNRTILKSWWDQTQTGTLIEINDVQTLTADRIEAYIRRIGGFDLVIGGSPCNNLAGSNRHHRDGLEGEHSSLFYHYFRILDSVKSIMERL

SEQ ID NO: 727 - protein, 685 aa, Zea mays
MDLDMDGYVDPYEEAAAEGDSDDPDEDDSDAESDYEEKSFGLLKSGKHRVRNPDGTFRCPFCLGKKKQGYKIKDLLQHADGIGVSSKHRRHGRERANHRAFARFVRTDPSFAEDLVGITGIQGAITTTPANENYSANGNGKAKANVDTAGSSSVAAKVGPPQEVERFAWPWACVLAAGAGFNAEDFVGRVALFSSVEVVPLFVDEMEVTETFAIVRFTNDWSGFNDALTIENYFSVNKLGKKEFQMRDSGLGSVEGDGEGDVKVYGWVARAEDYDATTVVGRFLRKHTVLQTIDEVSKTELEKSGEMVAILASQIEEKNRYLQDLETKKNATELSISRLEEDNRKLHEAYNEEMRNLHRRARENALRIFQENENLRIDLENKRRELNLRAKELEKMSAENANDRKTLDDQKQKTKYDNSELELASIEQQRADADVLKLLADQEREKEDVLARMLQLEKELHEKQQLELEVERLNGTLQVMKHLEGDDDGGDIHEKMEKLSERFEREKKRLEDLSGDLVTKERESNDELQQARKELIKGLEEELNGRTAVGIKRMGELDEKPFLNACKRKYGNNEYQVKAAELVTNWQEELKNPSWYPFKMIHVDGEDKEILVDDDTKLKFLWIEFGDDVCNAVKTALMEINEYNPSGRYVVPELWNFRKGRKATMKEVLKYLFSQMDTTTKRRRG

SEQ ID NO: 728 - protein, 691 aa, Zea mays
MDLDLDDYVDPYEEAEAEAAAAEDGSDDPDEDDSDAESDYEEESFGLLKSGKHRVRNPDGTFRCPFCPGKKKQGYKIKDLLQHADGIGVSSKHRRHGRERANHRAFARFVRTEPSFAEDLVGITGIQGAIKPTPANRDGSTNGDGKAKANVDTAGSSSVAAKVGLPREVERFSWPWACVLAAGAGFNTEDFAGRVAMFSSVEVVPLFVDEVEVAETFAVVRFTNDWSGFSDALTLENHFSINKLGKKEFEMRDNGIGSVEGDGGEGEVKVYGWVARAEDYDSPSVVGRFLRKHTVLKTIDEVSKTELEKSGEMVAILASKIEEKNRHLQDLETKKNATELSISRLEEDNRKLHEAYNEEMRNLHRRARENALRIFQENENLRIDLESKKRELNLRAKELDKISTENANDRKTLDNEKQKAKYDNSELELASIEQQRADADVLKLLADQEREKEDVLARMLQLEKELHEKQQLELEVERLNGTLQVMKHLEGDDDGGDIHEKMEKLSERFEREKKRLEELSGDLVRKERESNDELQEARKELIKGLEEELNGRTAIGVKRMGELDEKPFQNACKTKYGKDEYEIKAAELVTSWQDELKKPSWHPFKMVEVNGENKEILDDDDTKLKFLWIEYGDDVCNAVKTALMEINEYNPSGRYVVPELWNFRKGRKATVKEVLKYLFSQMDTTTKRRRG

SEQ ID NO: 729 - protein, 1536 aa, Zea mays
MLTNDFSGTRRCRAKPQKKEEESTENNKLENGSLDATEEVHHGVEKGDGHVTRKRPRRSAACSDFKEKSIRLSEKKSVVMVKKNRMEEEEVDAVNLTKLGPEDPPPCRKLIDFILHDAEGNPQPFEMSEIDDFFITALIMPMDDDLEKERERGVRCEGFGRIEDWNISGYDEGTPVIWVSTDVADYECVKPSTNYKSYFDHFYEKAQVCVEVFKKLAKSVGGNPNQGLDELLASVVRSTNAMKGYSGTMSKDLVISIGEFVYNQLVGLDETSNNDDEKFATLPVLLSLRDQCRSRVELTKLPSNFSNTSLKIKDSECDETAEDDDDAKLARLLQQEEEWKMMKKQRGRRGTPSQKNVYIKISEAEIANDYPLPAYYKPFSQEMDEYIFDSDDSIFSDDVPVRILNNWTLYNADSRLISLELIPMKSGAENDVVIFGSGFMRDDDGSCCSTAESVKSSSSSSKADQLDAGIPIYLSPIKEWIIEFGGSMICITIRTDVAWYKLRQPTKQYAPWCEPVLKTARLAVSIITLLKEQSRASKLSFADVIRKVAEFDKGNPAFISSNITLVERYIVVHGQIILQQFADFPDETIRRSAFVSGLLLKMEQRRHTKLVMKKKTQVMRGENLNPSAAMGPASRKKAMRATTTRLINRIWSDYYAHHFPEDSKEGDGNETKEIDDEQEENEDEDAEDEGQIEENISKTPPSTRSRKLLSQTCKEIRWEGETSGKTLSGETLYKCAYVRELRIPVGGTVALEDDSGDTVICFVEYMFQKVDGSKMVHGRILQKGSQTILGNAANEREVFLTNDCLEFKLDDIKELVMVDIQSRPWGHKYRKENSEADKVEQVKAEERKKKGQPMVYFCKSLYWPEKGAFFALSRDKMGLGSGLCSSCDNIEPDSDELKIFSKTSFVYRKVTYNVNEFLYIRPDFFAEDEDRATFKAGRNVGLKPYAVCQILSIPEGAGSKKLNPASANISARRFYRPDDISSAKAYASDIREVYYSEDVIDVPVDMIEGKCEVRKKNDLASSDLPVMFEHVFFCELIYDRASGALKQLPPNVRFMSMVQRTSALKKNKGKQICEPDQIDSGKWLDVPKENRLATLDIFAGCGGLSEGLQQAGVSFTKWAIEYEEPAGEAFNKNHPEAVVFVDNCNVILKAIMDKCGDTDDCVSTSEAAEQAAKLPEVNINNLPVPGEVEFINGGPPCQGFSGMNRFNQSPWSKVQCEMILAFLSFAEYFRPRFFLLENVRNFVSFNKGQTFRLAVASLLEMGYQVRFGILEAGAFGVAQSRKRAFIWAAAPGEMLPDWPEPMHVFASPELKITLPDGQYYAAARSTAGGAPFRAITVRDTIGDLPKVGNGASKLTLEYGGEPVSWFQKKIRGNMMVLNDHISKEMNELNLIRCQHIPKRPGCDWHDLPDEKVKLSNGQMADLIPWCLPNTAKRHNQWKGLYGRLDWEGNFPTSVTDPQPMGKVGMCFHPDQDRIITVRECARSQGFPDSYEFAGNIQNKHRQIGNAVPPPLAYALGRKLKEAVDKRQEASAGVPAP

SEQ ID NO: 730 - protein, 1115 aa, Zea mays
MLTNDFSGTRRCRAKPQKKEEESTENNKLENGSLDATEEVHHGVEKGDGHVTRKRPRRSAACSDFKEKSIRLSEKKSVVMVKKNRMEEEEVDAVNLTKLGPEDPPPCRKLIDFILHDAEGNPQPFEMSEIDDFFITALIMPMDDDLEKERERGVRCEGFGRIEDWNISGYDEGTPVIWVSTDVADYECVKPSTNYKSYFDHFYEKAQVCVEVFKKLAKSVGGNPNQGLDELLASVVRSTNAMKGYSGTMSKDLVISIGEFVYNQLVGLDETSNNDDEKFATLPVLLSLRDQCRSRVELTKLPSNFSNTSLKIKDSECDETAEDDDDAKLARLLQQEEEWKMMKKQRGRRGTPSQKNVYIKISEAEIANDYPLPAYYKPFSQEMDEYIFDSDDSIFSDDVPVRILNNWTLYNADSRLISLELIPMKSGAENDVVIFGSGFMRDDDGSCCSTAESVKSSSSSSKADQLDAGIPIYLSPIKEWIIEFGGSMICITIRTDVAWYKLRQPTKQYAPWCEPVLKTARLAVSIITLLKEQSRASKLSFADVIRKVAEFDKGNPAFISSNITLVERYIVVHGQIILQQFADFPDETIRRSAFVSGLLLKMEQRRHTKLVMKKKTQVMRGENLNPSAAMGPASRKKAMRATTTRLINRIWSDYYAHHFPEDSKEGDGNETKEIDDEQEENEDEDAEDEGQIEENISKTPPSTRSRKLLSQTCKEIRWEGETSGKTLSGETLYKCAYVRELRIPVGGTVALEDDSGDTVICFVEYMFQKVDGSKMVHGRILQKGSQTILGNAANEREVFLTNDCLEFKLDDIKELVMVDIQSRPWGHKYRKENSEADKVEQVKAEERKKKGQPMVYFCKSLYWPEKGAFFALSRDKMGLGSGLCSSCDNIEPDSDELKIFSKTSFVYRKVTYNVNEFLYIRPDFFAEDEDRATFKAGRNVGLKPYAVCQILSIPEGAGSKKLNPASANISARRFYRPDDISSAKAYASDIREVYYSEDVIDVPVDMIEGKCEVRKKNDLASSDLPVMFEHVFFCELIYDRASGALKQLPPNVRFMSMVQRTSALKKNKGKQICEPDQIDSGKWLDVPKENRLATLDIFAGCGGLSEGLQQAGMYC

SEQ ID NO: 731 - protein, 1536 aa, Zea mays
MLTNDFSGTRRCRAKPQKKEEESTENNKLENGPLDATEEVHHGVEKGDGHVTRKRPRRAAACSDFKEKSIRLSEKKSVVMVKKNRMEEEEVDAVNLTKLGPEDPPPCRKLIDFILHDAEGNPQPFEMSEIDDFFITALIMPMDDDLEKEREKGVRCEGFGRIEDWNISGYDEGTPVIWVSTDVADYECVKPSTNYKSYFDHFYEKAQVCVEVFKKLAKSVGGNPNQGLDELLASVVRSTNAMKGYSGTMSKDLVISIGEFVYNQLVGLDETSNNDDEKFATLPVLLSLRDQCRSRVELTKLPSNFSNTSLKIKDSECDETAEDDDDAKLARLLQQEEEWKMMKKQRGRRGTPSQKNVYIKISEAEIANDYPLPAYYKPFSQEMDEYIFDSDDSIFSDDVPVRILNNWTLYNADSRLISLELIPMKSGAENDVVVFGSGFMRDDDGSCCSTAESVKSSSSSSKADQLDAGIPIYLSPIKEWIIEFGGSMICITIRTDVAWYKLRQPTKQYAPWCEPVLKTARLAVSIITLLKEQSRASKLSFADVIRKVAEFDKGNPAFISSNITLVERYIVVHGQIILQQFADFPDETIRRSAFVSGLLLKMEQRRHTKLVMKKKTQVMRGENLNPSAAMGPASRKKAMRATTTRLINRIWSDYYAHHFPEDSKEGDGNEIKEIDDEQEENEDEDAEDEGQIEENISKTPPSTRSRKLLSQTCKEIRWEGETSGKTLSGETLYKCAYVRELRIPVGGTVALEDDSGDTVMCFVEYMFQKVDGSKMVHGRILQKGSQTILDNAANEREVFLTNDCLEFKLDDIKELVMVDIQSRPWGHKYRKENSEADKVEQVKAEERKKKGQPMVYFCKSLYWPEKGAFFALSRDKMGLGSGLCSSCDNIEPDSDELKIFSKTSFVYRKVTYNVNEFLYISPDFFAEDEDRATFKAGRNVGLKPYAVCQILSIPEGAGSKKLNPASANISARRFYRPDDISSAKAYASDIREVYYSEDVIDVPVDMIEGKCEVRKKNDLASSDLPVMFEHVFFCELIYDRASGALKQLPPNVRFMSMVQRTSALKKNKGKQICEPDQIDSGKWLDVPKENRLATLDIFAGCGGLSEGLQQAGVSFTKWAIEYEEPAGEAFNKNHPEAVVFVDNCNVILKAIMDKCGDTDDCVSTSEAAEQAAKLPEVNINNLPVPGEVEFINGGPPCQGFSGMNRFNQSPWSKVQCEMILAFLSFAEYFRPRFFLLENVRNFVSFNKGQTFRLAVASLLEMGYQVRFGILEAGAFGVAQSRKRAFIWAAAPGEMLPDWPEPMHVFASPELKITLPDGQYYAAARSTAGGAPFRAITVRDTVGDLPKVGNGASKLTLEYGGEPVSWFQKKIRGNMMVLNDHISKEMNELNLIRCQHIPKRPGCDWHDLPDEKVKLSNGQMADLIPWCLPNTAKRHNQWKGLYGRLDWEGNFPTSVTDPQPMGKVGMCFHPDQDRIITVRECARSQGFPDSYEFAGNIQNKHRQIGNAVPPPLAYALGRKLKEAVDKRQEASAGVPAP

SEQ ID NO: 732 - protein, 1115 aa, Zea mays
MLTNDFSGTRRCRAKPQKKEEESTENNKLENGPLDATEEVHHGVEKGDGHVTRKRPRRAAACSDFKEKSIRLSEKKSVVMVKKNRMEEEEVDAVNLTKLGPEDPPPCRKLIDFILHDAEGNPQPFEMSEIDDFFITALIMPMDDDLEKEREKGVRCEGFGRIEDWNISGYDEGTPVIWVSTDVADYECVKPSTNYKSYFDHFYEKAQVCVEVFKKLAKSVGGNPNQGLDELLASVVRSTNAMKGYSGTMSKDLVISIGEFVYNQLVGLDETSNNDDEKFATLPVLLSLRDQCRSRVELTKLPSNFSNTSLKIKDSECDETAEDDDDAKLARLLQQEEEWKMMKKQRGRRGTPSQKNVYIKISEAEIANDYPLPAYYKPFSQEMDEYIFDSDDSIFSDDVPVRILNNWTLYNADSRLISLELIPMKSGAENDVVVFGSGFMRDDDGSCCSTAESVKSSSSSSKADQLDAGIPIYLSPIKEWIIEFGGSMICITIRTDVAWYKLRQPTKQYAPWCEPVLKTARLAVSIITLLKEQSRASKLSFADVIRKVAEFDKGNPAFISSNITLVERYIVVHGQIILQQFADFPDETIRRSAFVSGLLLKMEQRRHTKLVMKKKTQVMRGENLNPSAAMGPASRKKAMRATTTRLINRIWSDYYAHHFPEDSKEGDGNEIKEIDDEQEENEDEDAEDEGQIEENISKTPPSTRSRKLLSQTCKEIRWEGETSGKTLSGETLYKCAYVRELRIPVGGTVALEDDSGDTVMCFVEYMFQKVDGSKMVHGRILQKGSQTILDNAANEREVFLTNDCLEFKLDDIKELVMVDIQSRPWGHKYRKENSEADKVEQVKAEERKKKGQPMVYFCKSLYWPEKGAFFALSRDKMGLGSGLCSSCDNIEPDSDELKIFSKTSFVYRKVTYNVNEFLYISPDFFAEDEDRATFKAGRNVGLKPYAVCQILSIPEGAGSKKLNPASANISARRFYRPDDISSAKAYASDIREVYYSEDVIDVPVDMIEGKCEVRKKNDLASSDLPVMFEHVFFCELIYDRASGALKQLPPNVRFMSMVQRTSALKKNKGKQICEPDQIDSGKWLDVPKENRLATLDIFAGCGGLSEGLQQAGMYC

SEQ ID NO: 733 - protein, 1030 aa, Zea mays
MAKPEEKLRCTKEPFIEDVGTRRIKSIRFSVLSGSEIRKSAEVQVWNNRIYDRDMTPVPNGLLDPRMGIPTKRGKCNTCHGEFSDCPGHFGYLKLALPVFNVGFFNCILDVLKCICKSCSRVLLIEKDRREFLKKMRNPRADALQKSATMKKVRDKCKLSCCPRCDYRNGVVKKGRAGLIVVHDCSKVLDGHTEELKNALQNKKEKVSASSVLVLDPATVLSLFRRMIDEDCELLNLGDRPEKLIVTEIAVPPVPIRPSVVVGNSRTSNEDSITVILKSIVNTNSILKETLHTGGPFTKCFDCWQYLQLQVVEYVNSDAPSLPESQHRGLVQRLKGKTGRFRGNLSGKRTEYTGRTVISPDPNLKITEVAIPVLMARVLTYPERVSNYNIEKLRQCIRNGPFKYPGANFVTQPDGMKQSLKYGDRRITARDLKCGCIVERHLEDGDVVLFNRQPSLHRMSIMCHRARIMPWRTLRFNESVCNPYNADFDGDEMNLHVPQTEEARTEALMLMGVQNNLCTPKNGEILVASTQDFLTSSFLVTRKDTFYDRSSFTLLCSYLGDGMENIDLPTPALIKPVELWTGKQLFSVLVRPNAHTKVFLNLAVQEKIYSKKKGKKEGGEEVKETMCGRETMCPNDGYVYFRNSELLSGQVGKATLGNGNKDGLYSVLLRDYNSHAAASCMNRLAKFSARFIGNHGFSIGVDDVQPGEHLNRQKKKEIDGGYKKCHDLISLFAKGALALHPGCNAAQTLEHNITGVLNEIRSIAGNVCMDTLHWRNSPLIMSQCGSKGSPINISQMVACVGQQSVGGRRAPDGFLNRTLPHFPINSKTPAAKGFVANSFYTGLTATEFFFHTMGGREGLVDTAVKTAETGYMSRRLMKGLEDLSVFYDQTVRNASGGIVQFLYGDDGMDPAKMEGKDGMPLNLDQLFMKVMATCPQRGSDTLSPVGIKQMLEDKFLQHDTSSDGGCSAEFKKNLTEFLDKRIELMKCTRRALHLHEDHVEKKDSCLEESIAAIISGISAKQLQVRVYNLL

SEQ ID NO: 734 - protein, 1444 aa, Zea mays
MELHREPPEAILNAIKFDLMTSTDMEKLSSMSIIEVSDVTSPKLGLPNGSLQCETCGSQRGRDCDGHFGVTKLAATVHNPYFIDDVVHFLNRICPGCLSPREGIDTKRLEREKVQATCKYCSKDGSKLYPSIVFKTLSSPRVLLFKSKLHRNASVMERISIVAEAADRMPNRSKGKGSLEGLPLDFWDFVPSENKQVQSNMTKIILSPYQVFYMLKKSDPELIKQFVSRRELLFLSCLPVTPNCHRVVEIGYGLPDGRLTFDDRTKAYKRMVDVSRRIDDYRQHPHFSVLASSLVSSRVSECLKSSKLYSKKADGETSTDTYGMKWLKDVVLSKRSDNVFRSIMVGDPKIKLWEIGIPEDLSSSLVVSEHVSSYNFQSTNLKCNLHLLAKQELFIRRNGKLMFLRKADQLEIGDIAYRPLQDGDIILINRPPSVHQHSLIALSAKILPIHSVVSINPLCCTPFAGDFDGDCLHGYIPQSIRSRVELEELVSLHNQLLNMQDGRNLVSLTHDSLAAAHLLTSTDVFLKKSELQQLQMLCLSVSTPAPAVIKSMNFQGSLWTGKQLFSMLLPSGMNFSCDTELHIMDSEVLTCSLGSSWLQNNTSGLFSVMFKQYGCKALDFLSSAQEVLCEFLTMRGLSVSLSDLYMFSDHYSRRKLAEGVKLALYEAEEAFRVKKILLDPINIPVLKCHDETEDVTYRQSDCIQSNPSVIRSSIMAFKDVFRDLLKMVQQHVSNDNSMMVMINAGSKGSMLKYAQQTACIGLQLPASKFPFRIPSQLSCISWNGQKSLNYEAESTSERVGGQNLYAVIKNSFIEGLNPLECLLHAISGRANFFSENADVPGTLTRKLMYHLRDIHVAYDGTVRSSYGQQIVQFSYDSVDDLVDKLGAPVGCRAACSISEAAYGALEHPVNGLEDSPLMNLQEVFKCHKATNSGDHIGLLFLSRHLKKYRYGLEYASLEVKNHLERVNFSDLVETIMIIYDGHDKIRNEGMWTTHFHINKAMMKKKRLGLRFVVDELAKEYDTTRDQLNNAIPSIRISRRKCLVGDEGVKSSSCCIAVVAHAERNSISQLDTIKTRVIPSILDTLLKGFLEFKDVEIQCPHDGELLVKVCMSEHCKGGRFWPTLQNACIPVMELIDWELSQPSNVSDIFCSYGIDSAWKYFVESLKSATTDTGRNIRREHLLVIADSLSVTGQFHALSSQGLKQQRTRLSISSPFSEACFSRPAQSFINAAKQCSVDNLCGSLDAVAWGKEPFNGTSGPFEIMHSGKPHEPEQNESIYDFLCSSKVRNFEKNHLDTRRQSTENASICRLACKSSKGSTTVNGVAITIDQDFLHAKVSIWDNIIDMRTSLQNMLREYPLNGYVAEPDKSQLIEALKFHSRGAEKIGVGVREIKIGLNPSHPGTRCFILLRNDDTTEDFSYHKCVQGAADSISPQLGSYLKKLYYRA

SEQ ID NO: 735 - protein, 1444 aa, Zea mays; identical to SEQ ID NO: 734

SEQ ID NO: 736 - protein, 896 aa, Zea mays
MDNTHHLWPAEAHGAAGGESHPDHALQPAPRQPIPGPAPAGRRQLRVLLLQRHAARQLRRAFRLHQAAGAHLPPQSHHRAGKILNLVCLRLKKPKQKDTGKECRFTSCSYCQHIPDVKKVQSGSLLCLNNEIVLLLQTPAFLLFQDLPPLCVSQVKKFNGARSLELKAPLKQEVAVRFWSFLDQFGFHTSGTSHRRPLHPKEDGYVMDNMSVPPNCLHVSNILDDNTEMCPPDTPKGLLRKILRTIEQIKSLNISQTRELGADDLQVAVGDYMDMGGPAEVFQHVTFTRQPAPKQWHKKMKALFLSKSSSYSCRAVITGDPYIGLDVVGVPDEVARRMTVQECVTNYNIARLQDMMEKGLCLTYTDLNTNTYDLDGKKGNKKCIMPRVGETVERRVLDGDLVFLNRPPSTDMHSVQALYVHVHDDHTIKINPLICGPLGADFDGDCVHIFSPRSVPGRVEAAELFTVEKQLLNSHNAKLNFQIKNDYLLALKIMCVRSYSREKASQIAMFSSGMILPGDWTIPQILQTTDALRTLPSHPNKQSVGASVTAIISSTLSEKGPRGAIKLINLLQPLLMESLLMDGFSISLKGLDGRCAMQKANQSSSLETDKFNKLTVDSIVNSSALGLLVDPKKDSTLKKLVEQIGFLGQQLQRTGRLYSSNLVEDCYNFLERCSGSTKCYDPSKGHDFVTSSFYNGLNPYEELLHSISVREKIERSSSKGLAESGNLFKNMMAMLRDVTVCYDGTMRTSCSNSIVQFDSTNVSSSVTPGDPVGILAATAFVNAAYKAVLDPVFGHSVEHPPGAQNPRMIASRRQGHMNVASLGALQLRLGSAAPPSSAMAAFSSGNSGRSGWPASGSKTSSSLEPKKKSELTGGHRGEEEREQLLVRENFPAAEYV

SEQ ID NO: 737 - protein, 554 aa, Zea mays
MRTLFISKGSGFSSRSVLTGDPYIGLGVVGLPSEVAKRMTFEEQVTDININRLQDVVDKGLCLTYRDGQATYAITVGSKGYTTLKVGQTISRRIVDGDVVFLNRPPSTHKHSLQAFYAYVHDDHTVKINPLMCGPFSADFDGDCVHIYYPQSLAAKAEALELFSVERQLISSHSGKVNLQLGNDSLVAMKAMSHTTMLHKELANQLAMFVPFSLLAPAVIKPVPSWTISQIVQGAFPANLTCQGDTHLVRDSTIIRLDLGKESVQDSFPDLVSSILREKGPKEALQFLNVLEPLLMEFLLLDGLSISLRDFNVPKALLEEAQKDIRNQSLILEQSRCSTSQFVEFRVENNLKNVKQQISDSVGKFSDLGLLIDPKKEASMSKVVQQVGFVGLQLYREGKLYSRRLVEDCFTNFVNKHLAIGDEYPPEAYGLVQSSYFHGLNPYEELIHAISTREAMIRSSRGLSEPGTLFKNLMAILRDVVICYDGTVRNICSNSIIQLKYGEDDETDSSSVVPPGEPVGVLAATAISNPAYKAVLDSSQSNNASWESMKVVML

SEQ ID NO: 738 - protein, 1850 aa, Zea mays
MDARFPYSPAEVAKVEFVQFGILSPDEIRQMSVIQIEHAETMERGKPKPGGLSDPRLGTIDRKIKCETCMAGMAECPGHFGHLELAKPMFHIGFIKTVLSIMRCVCFNCSKILADEDETKFKQALKIRNPKNRLKRIYDACKSKKVCAGGDDLDVQEQDTDEPIKKRGGCGAQQPNITVDGMKMVAEFKAPKKKTDDQDQLPEPVERKQILSAERVLNVLKRISDEDCLLLGLNPKYARPDWMILQVLPVPPPPVRPSVMMDTSSRSEDDLTHQLAMIIRHNENLRRQERNGAPAHIITEFAQLLQFHIATYFDNDLPGQPRATQRSGRPIKSICSRLKAKEGRIRGNLMGKRVDFSARTVITPDPNINIDELGVPWSIALNLTYPETVTPYNIERLKELVEYGPHPPPGKTGAKYIIREDGQRLDLRYVKKSSDQHLELGYKVERHLNDGDFVLFNRQPSLHKMSIMGHRIKIMPYSTFRLNLSVTSPYNADFDGDEMNMHVPQSFETRAEVLELMMVPKCIVSPQSNRPVMGIVQDTLLGCRKITKRDTLIEKDVFMNILMWWQDFDGKIPAPTILKPRPIWTGKQVFNLIIPKQINLIRFSAWHSEEEKGFITPGDTMVRIEKGELLSGTLCKKSLGTGSGSLIHVIWEEVGPDAARKFLGHTQWLVNYWLLQNGFSIGIGDTIADASTMETINDTISKAKNAVKELIKKAHEKQLEAEPGRTMMESFENRVNQVLNKARDDAGSSAQNSLSESNNLKAMVTAGSKGSFINISQMTACVGQQNVEGKRIPFGFIDRTLPHFTKDDYGPESRGFVENSYLRGLTPQEFFFHAMGGREGLIDTAVKTSETGYIQRRLVKAMEDIMVKYDGTVRNSLGDVIQFLYGEDGMDAVWIESQKLDSLKMKKPEFDNVFRYELDDENWRPNYMLPEHVDDLKTIREFRNVFEAEVQKLEADRYQLGSEITTTGDNSWPMPVNLKRLIWNAQKTFKIDFRRPSDMHPMEIVEAIDKLQERLKVVPGDDAMSIEAQKNATLFFNILLRSTFASKRVLKEYRLTKEAFEWVIGEIESRFLQSLVAPGEMIGCVAAQSIGEPATQMTLNTFHYAGVSAKNVTLGVPRLREIINVAKKIKTPSLSVYLKPQVNQKKELAKNVQCALEYTTLRSVTHATEIWYDPDPLGTIIEEDTEFVQSYYEMPDEDIDPDKISPWLLRIELNREMMVDKKLSMADIAEKINREFDDDLSCIFNDDNADKLILRIRITNDEAPKGEIQDESAEDDVFLKKIEGNMLTEMALRGIPDINKVFIKEGKVNTFYQDDGFKAANEWMLDTEGVNLLAVMCHEDVDATRTTSNHLIEVIEVLGIEAVRRSLLDELRVVISFDGSYVNYRHLAILCDTMTYRGHLMAITRHGINRNDTGPLMRCSFEETVDILLDAAVYAESDHLRGVTENIMLGQLAPIGTGGCALYLNDQMLQQAIELQLPSYVEGLDFGMTPARSPITGTPYHEGMMSPSYLLSPNIRASPINTDASFSPYVGHMAFSPFPSPGGYSPSSGGYSPSSPVFTPEKGYSPLSPSYSPASPSYSPTSPSYTPGSPTYSPTSPNYSPTSPTYSPTSPSYSPTSPSYSPTSPSYSPTSPSYSPTSPSYSPTSPSYSPTSPVYSPTSPAYSPTSPAYSPTSPSYSPTSPSYSPTSPSYSPTSPSYSPTSPSYSPTSPSYSPTSPAYSPTSPGYSPTSPSYSPTSPSYSPTSPSYNPSSAKYSPSHAYSPSSPRMSPYSQTSPSYSPTSPTYSPTSPSYSQPSPSYSPTSPFNTSGGPSPDYSPTSPNYSPSGSYSPTAPGYSPSSTGQGNDKDDKSAR

SEQ ID NO: 739 - protein, 1229 aa, Zea mays
MEEPQKDSGQPSKSSDSELEAMVLDDNGAGKSHSMEENRDSPIDVDGGQSSMDVDIKGKSSLSDDVNGKSSSEPYSNAPIDMSVESLEKFCKEASRSFFDEVGLISHQINSYNEFVSHGLQELFDSLGEVIVEPGYDPSKKGSGGWKHAIIKFGRVKLEKPVFWTGKDEGSVDFKPWHARLQNMTYASRLIVEVTIQVYSLEKSDKSKTGNDGFVQKRNFMNETHWIFIGLLPVMVKSNLCLLHSLNESECLFDAGGYFLVKGMEKVFIAQEQRCLRRLWISDRPCWTISFMSEIKRRRIYIKLVESTRSEDFSESKIITISFLYATMPVWLLFFALGISSDKEVFDMIDMQDCDASVINTISATIKESDKLCEDFRKSDKARQYVDELVKSSRFPPAESFDDYIARFLFPDISGNRNKALFLGYMVKCLLMAFTGKRKCDNKDDFRNKRLDLPGELLGRELRAQLRLAEKRMVKAIQRDLNSDRELQDLERYIDASIVTNGLNRAFSTGSWCHPYKRAERCSGIVATLRRTNPLQMMSDLRKTRQRVAYAGKAGDARYPNPSYWGKLCFMSTPDGENCGLVKNLAVTAIVSSRVMQPLIESFISCGMSKLNDIPTEHIQRMDKIFLNGNWVGSCENSASFVFRLRCMRRSSLIDPQVEIKRDKHHNEVRVFTDAGRILRPLLVVENLNKIRKPKGRSFSFHELMQQEIIEFIGVEEEEDIQCAWGIRHLFESEGAISSYTHCELDPSFLLGLSCGIIPFANHNFARRVLYQSEKHSQQAIGYSTTNPHIRVDTLSHQLYYPQRPLFKTVIADCLGRSDYASFGRKNDFARPEYFNGQNAIVAVNVHQGFNQEDSLVMNRASLERGMFRTEHLRSYKADVENKDGTKRLKLKEKIDFGKTESKRGRVDNLDDDGLPYVGASLQTNDIVIGKVSESGEDHSIKLKHTEKGMVQKVLLSANDEGKNFAVVTLRQVRTPCLGDKFSSMHGQKGVVGFLESQENFPFTHEGIVPDIVINPHAFPTRQTPGQLLEAALGKGIACKGTMRYATPFTTASVDVIAEQLHRAGYSRWGSENVLNGRTGERVQSLVFMGPTFYQRLIHMSEDKVKFRNTGPVHPLTRQPVADRKRFGGVKFGEMERDCLLAHGSAANLHERLFLLSDFSQMHICQTCERVANVVMRSVPGGKKIRGPYCGFCKSSENIVRINVPYGAKLLYQELFSMGICLKFETQVC

SEQ ID NO: 740 - protein, 1063 aa, Zea mays
MEEPQKDSGQPSKSSDSELEAMVLDDNGAGKSHSMEENRDSPIDVDGGQSSMDVDIKGKSSLSDDVNGKSSSEPYSNAPIDMSVESLEKFCKEASRSFFDEVGLISHQINSYNEFVSHGLQELFDSLGEVIVEPGYDPSKKGSGGWKHAIIKFGRVKLEKPVFWTGKDEGSVDFKPWHARLQNMTYASRLIVEVTIQVYSLEKSDKSKTGNDGFVQKRNFMNETHWIFIGLLPVMVKSNLCLLHSLNESECLFDAGGYFLVKGMEKVFIAQEQRCLRRLWISDRPCWTISFMSEIKRRRIYIKLVESTRSEDFSESKIITISFLYATMPVWLLFFALGISSDKEVFDMIDMQDCDASVINTISATIKESDKLCEDFRKSDKARQYVDELVKSSRFPPAESFDDYIARFLFPDISGNRNKALFLGYMVKCLLMAFTGKRKCDNKDDFRNKRLDLPGELLGRELRAQLRLAEKRMVKAIQRDLNSDRELQDLERYIDASIVTNGLNRAFSTGSWCHPYKRAERCSGIVATLRRTNPLQMMSDLRKTRQRVAYAGKAGDARYPNPSYWGKLCFMSTPDGENCGLVKNLAVTAIVSSRVMQPLIESFISCGMSKLNDIPTEHIQRMDKIFLNGNWVGSCENSASFVFRLRCMRRSSLIDPQVEIKRDKHHNEVRVFTDAGRILRPLLVVENLNKIRKPKGRSFSFHELMQQEIIEFIGVEEEEDIQCAWGIRHLFESEGAISSYTHCELDPSFLLGLSCGIIPFANHNFARRVLYQSEKHSQQAIGYSTTNPHIRVDTLSHQLYYPQRPLFKTVIADCLGRSDYASFGRKNDFARPEYFNGQNAIVAVNVHQGFNQEDSLVMNRASLERGMFRTEHLRSYKADVENKDGTKRLKLKEKIDFGKTESKRGRVDNLDDDGLPYVGASLQTNDIVIGKVSESGEDHSIKLKHTEKGMVQKVLLSANDEGKNFAVVTLRQVRTPCLGDKFSSMHGQKGVVGFLESQENFPFTHEGIVPDIVINPHAFPTRQTPGQLLEAALGKGIACKGTMRYATPFTTASVDVIAEQLHR

SEQ ID NO: 741 - protein, 1259 aa, Zea mays
MGKPQTDGDQSPVNSDTDVMDCLNFDGHGDVEDPHKEVAKGEQQPSGEVDEQQSVMDVDLTCITSVGDEGNEKQNAMDVDLKEILSEEDGGEGKASSDLPSQVPVDFNVASLEKFCKEAARSFFSETGLVSHQINSYDHFVSHGLQELFDSLGEITVEPDYDPSNKHGAWKHATVKFGRVKLDEPVFMLENSDLEEQDLKFKPRHARLQKMTYASRMNVEMTVQVYIFDTSDKAKTGKDTHVHKREIMTETKQINIGLLPVMVKSNLCWLHKSQKGDCPFDFGGYFLIKGTEKVFIAEEQRFLSRIWVTDHPSWDASYLSQIRREKINIKLVPSKSNESCKVINICFMGTIMPIWVAFFALGVSSDKEAFDMIDILDCDADIVNIISLTIKESHEEFEGFRTPGRARQYVDELIRKSKFPPKESFDEYVCRYMFPGVNGFRSKALFLGYMVKCLLMAYSGNRKCDNKDDLRNKRLDLSCQLLRRELWTHIKRAERRMVKLMQRDLSNDGNLQDLRRYVDASIITNGLNRAFSTGSWRHPYKKERCSGVVATLRRTNPLQMMSDVRKTRQWFAYAGTAGDARYPNPSYWGKLCFLSTPDAEKCGFVKNLAVTAVVSSVVRKPLIDTFVSCGMKKLDDISLQDISGKDRIFLNGSLLGVCADPHELTLRLRSLRRSKLIDPQVEIKRDKHHKEVRVFSDPGRIMRPLLVVENLRRITRPKDGLYSFQELIDQNIVELIGVEEEEDIQCAYGIRHLFSSREKEDWSSSGYTHCELDPSFLLGLSCSLIPFGNHDNARRVQMQAEKISQQAIGYSPTNSQYRLDTLSHQMFYPQRPLFRTVVSYGLGEAKTDCSSGRKDDFNTPEYFNGQNAIVSVNVHQGFNQEDSLVMNRASLERGMFRTLHFKSYKAQVENKEITRRLKHRENINFGKVQSKRGKVDSLDSDGLPYVGASLQSGDIVIGKVTESGEDHSAKLMHTEKGMVDKVVLSANDDGVNFATVTLRQSRSPCVGDKFASMHGQKGVVGLLDSQENFPFTSQGIVPDMVINPHGFPTRQTPGQLLEAALGKGIALGGKVRYATPFTTPTVEVIAEQLHKAGFCRWGEESVLNGQTGERMKSLVFMGPTFYQRLVHMAEDKVKFRNTGPVHPLTRQPVEDKKRFGGVKFGEMERDCMLAHGAAANLHERLFTLSDFSRMHICQACERVANVIVRAAEGGGGKKVRGPYCLFCRSAERVVRVDVPYGSKLLYQELFSMGICLKFETEVR

SEQ ID NO: 742 - protein, 267 aa, Zea mays
MEELQKDSALPSNSSDSEPEAMELDDNGAGKSHSIEGNRDSPIDTDEGQPSMDVDIKGKSSLNDDVNGKSSSEPFSNPPINMSVESLEKFCKEASRSFFDEVGLISHQINSYNEFVSHGLQELFDSLGEVIVEPGYDPSKKGSGSWKHAIIKFGRVKLEKPVFWTGKDEVSVDFKPWHARLQNMTYASRLRVEVTIQVYSLEKSDKSKTGNDGFVQKRNFMNETHWIFIGLLPVMVKSNLCLLHSLKESECLFDAGGYFLVKGMEKV

SEQ ID NO: 743 - protein, 1127 aa, Zea mays
MSTAAPAPGSTATVRVSNIPASAIAAELLAFFDSAVTIAGATFACEIVAAHRGWLSRGHGFVQFDSSAAATHAIDLASSGRLPPFLGSCLSVSPARADLLPRAPDLSLRAASASLILGNRVAERELEVAYSCDGVRAEVIPRMRRVDLYLKHDSQSYKLEVLFEDINECFGCHLDGTGAILLQLTYAPRIHIAISGSTVKSRFTDDRFHACKEDAKFAWVRALDFTPNSSFGECSTLVLKLSKGASVSYILESLPFSGELGELAIASMDVFGSSSNVVPLVDCPNGFSVPYEVLFRLNSLVHMGKLVARHVNADLFKVLEDLSIDTLRRIFEKMSKLKSTCYEPLQFIRHEAHSMNMRKKALSNKRESGKLMRCYRIHITPSKIYCLGPEEEVSNYVVKYHSEYASDFARVTFVDEDWSKLSPNALSARTEQGFFSKPLKTGLYHRILSILKEGFCIGPKKYEFLAFSASQLRGNSVWMFASNSSLTAENIRRWMGHFEDIRSVSKCAARMGQLFSSSRQTFEVSSYDVEVIPDIEVTTDGTKYIFSDGIGKISTRFARQVAKLIGLDPAHPPSAFQIRYGGYKGVITIDPTSFFNLSLRPSMKKFESKSTMLNITNWSKSQPCYVNREIISLLSTLGIKDEVFESMQQDDMHESDGMLTNKEAALSVLGKIGGGDTKTAADMLLQGYEPSSEPYLLMILKAHRANRLTDIRTRCKIHVQKGRVLIGCLDETCKLEYGQVYIRITKNHKEQKYSEQPFFCNDDGKTAVIVGKVAITKNPCLHPGDVRVLEAVYDPGLDARGLIDCVVFPQRGERPHPNECSGGDLDGDLFFITWDDKLIPEKVDAPMDYTATRPRIMDHAVTLEEIQKHFVSYMINDTLGAISTAHLIHADRDPLKARSPECVQLAALHSMAVDFAKTGAPAEMPLALRPREFPDFMERWERPMYVSNGVLGKLYRAALRHEEDAEALLPAGPPSCVYDPDLEVAGFDEFLDAAEERYEAYAERLGALMTYYSAEREDEILTGNIRNKLVYLRRDNKRYFEMKDRIIAAVDALHAEVRGWLRACKEDDASRVASAWYHVTYHPDRRGEKRFWSFPWIICDTLLAIKAARRCRKRVEDAAVPMDCDGS

SEQ ID NO: 744 - protein, 937 aa, Zea mays
MGSLRGAAASSAAPRAGDLVTTQVSLGGFDATVKALDLADFLELNAGSVWRCRLKTSWTPPDAYPDFLLPTVTSAAAPPPQYDRVPPHAFVHFARPEGARAAADAAGRSELILSGKPLRAASAQDSSLRASRRRSVSPFRFPGSRLEVGDLPASDAFIAAWRGPASGLEFSVDPFDGSCHFIFARDTAFKVREFRESVVMRCDVKLQFPVRDVAEVRVFRLDCSLLIRLSAAPLVCYRTADDDIHVSVPFDLLDDDDPWIRTTDITPSGAIGRCGAYRITFSPRFWPKMERALTYMRDRRVAILDCVGGWGARRGLTVRDEPEFGERMQDLFFCVQHAEGLKFPVLFLVNALVHKGVISQHHLTPEFFGLLQRKEDDVNVAALREFWGDKFPVFDACGRLKNLQDRVARYLKHLRNKIGDVNSEVRRLVITPTKAYCMPPEVERSNRVIRHYSEVSDRFLRVTFMDERMQMLNSNVLNFSAAQIVKDLMSNSFLHKTTVYKRVKTFLTEGFHMCGRKYSFLAFSSNQLRDRSAWFFAEDRTTTVETIRKWMGRFTSKNVAKHAARMGQCFSSTYATVVLQPHEVNECLDEVEHNGYIFSDGIGKITCDLALEVAQKLQLTDNPPSAYQIRYAGFKGVISVWEGKNDGIRLSLRPSMHKFESNHTVLEVVSWTKFQPGFLNRQIITLLSSLNVPDAIFAQMQEAMLSNLNNILSDSDVAFDIVTASCAEQGTTAALMLSAGISPGTEPHLKAMLLAIRSSQLLGLLEKTRIFVPKGRWLMGCLDELGILEQGQCFIRASSPSLNNCLVKYGSRLSAANTNAETILGTIVMAKNPCLHPGDVRILEAVDVPELHHLVDCLVFPKKGERPHANEASGSDLDGDLYFVTWDENLIPPGKKSWNPMDYSPAEAKQLPRAVSQHFWTMSLYGYIVFYSLQSGF

SEQ ID NO: 745 - protein, 1901 aa, Zea mays
MEVSHRGRRPSPEPRRNPSIAGDLGIQSMNRTRCDEAFDETNAAHPHHERRRTAGRRPPGHNLAEEWPTGPATRAILTGFDAGLSARGLADELERLAGTVWRCRIKTSVTPPESYPDFQLSVHAAAAAAVFHQDEPPRDGRVAPHAFVHFEHRNAADRAGDFFTTRILAQSRHMLHGHAARRRDGVTDAAKPMLFPNSCIEIGDVVAPDTFLVAWRGTDDSASALDFVVDPSGGSCRLLFARYTAFTCPDRRRPAALLCCDVKLEFALAHVAEALAFQADDSLVLRLSAAPLVYYRTSGDDVHGRVPFQLVDADDDPWIRTTDVTRSGAIGRCLAYRVSFAVQFWPTMRVALECMQRQGVPVHVRDRRCRGFTVLEEAGLVQPMRDAFFSPRHDDDAGAGLRFPVLYLVNVLMHNGVVNPHQMTPEFFGLLMRTREDVNVAALTELFGAKLGVCDNPCWREYCMPVERSNRVIRHYHELSDRFLRVTFTDEGMLPLNPNALTLRAVPSTSTPSTSRQMTSVYRRVQTALTEGLIMCGRRYSFLAFSASQLKQKSAWFFAEDGATTVAGIKEWMGQFPIRNPAKHAARMGLCFTSSYATVTMQPGEVDEDLEDVTRNGYNFSDGIGVITEDLALEVAEMLPLADRFAPSAYQIRREVFEETRVAMARSRTRSPESTRRLAHRLRAIKPSKSNQQHPHHERRRTAGRRPPGHNFAEEWPTGPATRAILTGFDAGLSARGLADELERLAGTVWRCRIKTSVTPPESYPDFQLSVHAAAAAAVFHQDEPPRDGRVAPHAFVHFEHRNAADRAGDFFTTRILAQSRHLLHGHAARRRDGVTDAAKPMLFPDSRIEIGDVVAPDTFLVAWRGTDDSASALDFVVDPSGGSCRLLFARYTAFTCPDRRRPAALLCCDVKLEFALAHVAEALAFQADDSLVLRLSAAPLVYYRTSGDDVHGRVPFQLVDADDDPWIRTTDVTRSGAIGRCLAYRVSFAVQFWPTMRVALECMQRQGVPVHVRDRRCQGFTVLEEAGLVQPMRDAFFSPRHDDDAGAGLRFPELYLVNVLMHNGVVNPHQMTPEFFGLLMRTREDVNVAALTELFGAKLGVCDNPCWRLKNAQDKAAKNLDLVCRSSSSRRKASDCDAEVRRLIVTPTREYCMPPQVERSNRVIRHYHELSDRFLRVTFTDEGMLPLNPNALTLRAVPSTSTPSTSRQMTSVYRRVQTALTEGLIMCGRRYSFLAFSASQLKQKSAWFFAEDGATTVAGIKEWMGQFPIRNPAKHAARMGLCFTSSYATVTMQPGEVDEDLEDVTRNGYNFSDGIGVITEDLALEVAEMLPLADRFAPSAYQIRYAGFKGVVAVSPPGPGQEDRGTRRMSLRPSMRKFESTHNVLEVVSWTKFQPAFLNRQIITLLTTLGVPDDSFWQLQEAMLGKLRRVLSDSDVAYEVVTNSCPEQGSTAGLMLGAGFAPATEPHLRAMLLAICTSQMQGLLNKTWIFVPKGRWLMGCLDEFGILEQGQCFLRVSTPSLGSRCVNRSPIFPSEYKGDANAQVITGTVVMAKNPCLHPGDVRILEAVDVPDLYHLVDCFVFPKKGERPHADEASGSDLDGDVYFVTWDESLVPPGRKSCTPMDYSPAKTKQLPHDVHQQDTIDFYLESMVYDNLGRICNAHAAHADRSDDGAMDPKCIELARLASIAVDSAKTGEIVRMPPALSPKEYPDFMGKEDAISYRSEKILGRLYRSVLGENDGDFLSRGACISDEIRYDADLEVPGASDFLQDAWRCRCLYEARLNALLDQYNVRSEAELVTGEIWSLAGCSKKYQHQLKERINYAYSKVHQEFRIIFESIGASTDNKNLAYEMKASAWYQVTYHPEIIRSREPGDEDAPTRLSFAWIAVDYLAQIKMKRHVD

SEQ ID NO: 746 - protein, 1241 aa, Zea mays
MARSRTRSPESTRRLAHRLRAIKPSKSNQQHPHHERRRTAGLRPPGHNFAEEWPTGPATRAILTGFDAGLSARGLADELERVAGTVWRCRIKTSVTPPESYPDFQLSVHTAAAAVFHQDQDEPPRDGRVAPHAFVHFEHRNAADRAGDFFTTRILAQSRHLVHGHAARRRDGVTDAAKPMLFPDSRIEIGDVVAPDTFLVAWRGTDDSASALDFVVDPSGGSCRLLFARYTAFTCPDRRRPAALLCCDVKLEFALAHVTEALAFQADDSLVLRLSAAPLVYYRTSGDDVHGRVPFQLVDADDDPWIRTTDVTQSGAIGRCLAYRVSFAVQFWPTMRVALECMQRQGVPVHVRDRRCRGFTVLEEAGLVQPMRDAFFSPRHEHDDDAGLRFPELYLVNVLMHNGVVNPHQMTPEFFGLLMRTREDVNVAALTELFGAKLGVCDNPCWRLKNAQDRAAKNLDLVCRSSSSSRRRKASDCDAEVRRLIVTPTREYCIPPQVERSNRVIRHYHELSDRFLRVTFTDEGMLPLNPNALTLRAVPSTSTPSTSRQMTSVYRRVQTALTEGLIMCGRRYSFLAFSASQLKQKSAWFFAEDGATTVAGIKEWMGQFPIRNPAKHAARMGLCFTSSYATVTMQPGEVDEDLEDVTRNGYNFSDGIGVITEDLALEVAEMLPLADRFAPSAYQIRYAGFKGVVAVWPPGPGQEDRGTRRMSLRPSMRKFESTHTVLEVVSWTKFQPAFLNRQIITLLTTLGVPDDAFWQLQEAMLGKLRRVLSDSDVAYEVVINSCPEQGSTAGLMLGAGFAPATEPHLRAMLLAICTSQMQGLLNKTWIFVPKGRWLMGCLDEFGILEQGQCFLRVSTPSVGSRCVNRSPIFPSEYKGDADAQVITGTVVMAKNPCLHPGDVRILEAVDVPDLYHLVDCFVFPKKGERPHADEASGSDLDGDVYFVTWDESLVPPGRKSCTPMDYSPAKTKQLPRDVHQQDTIDFYLESMVYDNLGRICNAHAAHADRSDDGAMDPKCIELARLASIAVDSAKTGEIVRMPPALSPKEYPDFMGKEDAISYRSEKILGRLYRSVLGENDGDFLSRDACISDEIRYDADLEVLGASDFLQDAWRCRCLYEARLNALLDQYDVCSEAELVTGEIWSLAGCSKKYHHQLKERINYAYSNLHQEFRSIFESIDASTDNKNLAYEMKASAWYQVTYHPEIIRSREPGDEDAPTRLSFAWIAVDYLAQIKMKRHVD

SEQ ID NO: 747 - protein, 594 aa, Zea mays
MSGSGDRRGGGPPGSHSGWETMGKKSKKPGQAGGRQWAPWSSTNVTPNTARPAWGGSGSSHPSGTSWAQAPDHGAATRGNPRPPSQTSRPVLAPPLANGWQWQSRPRPSGSEVKKDDAPPSGSVPEVENVDGNNTSDDDDDDDDDLSDDISDDYDSDASEKSFETRKTNKWFKEFFEVLNTLSLEQINEQTRQWHCPACKNGPGAIDWYKGLQPLVSHARTKGSTRVKLHRELAALLEEELSRRGTSVLPAGEQFGKWKGLQESTDREIVWPPMVIVMNTFLEKDEDDKWKGMGNQELLDYFGEYEASKARHAYGPSGHRGMSVLIFESSAVGYMEAERLHKHFVNQGTDRNSWHLRKVRFVPGGKRQLYGFLANKEDMEAFNKHCHGKSRLKYEMRSYNEMVVIQMKQMSEDNQQLNYLKNKMVKTEQRSKAVEESLGVVTQKLRETIEENIFVRSKAKEKHMEYEEEMKSQEEIFHGLIEDIHKATEDKEKQFEKLLQEERSKARRFDVDSGTMKDRQLRKEYVQKFIDCQVKDVAEFEVERDELIKVHEDKKLKLKKEYMDLELELEKEFDAALTGLMEKHKPDTFEASSS

SEQ ID NO: 748 - protein, 682 aa, Zea mays
MDVVESSPSSSPISSPAGSSESIDLNFLPFLKREPKSEPASPELGPLPLPAPPTQTPQQQHAAAPAPEATAPLSPATPDLSSAPVMAPLQSLPPNLDEDALLREYYRLAGLYLSSARSGAIIPALAPEAAAPAVVQSGSGSVVKKRRPRSSDLVRVSSLGVQDQIYFRDLVRRARITFECLRGLLLRDDERAESLGLAAVAGFGVARDRRRVRADLRAAALMGDHDLWLNRDRRIVGPMPGISVGDAFFFRMELCVLGLHGQVQAGIDYVSAGRSASGEPIATSIIVSGGYEDDDDHGDVLVYTGHGGRDPNLHKHCVDQKLEGGNLALERSMAYGIEIRVIRAVKSRRSPVGKVYFYDGLYKVVDYWLDRGKSGFGVYKYRLLRIEGQEPMGSVNYRVAEQLKVDVFAIRPTGYLSFDISMGRDTLSVALFNDVDDDQDPLLFEYLARPIFPTSAVQGKFAEGGGGGCDCAEICSIGCNCAGRNGGEFAYDRTGTLLRGKPLVYECGPYCRCPPSCPNRVSQKGLQHRLEVFRSRETGWGVRSLDLIKAGTFICEFSGIILTHQQSEVVAANGDCLVRPSRFPPRWLDWGDISDVYPDYVAPDHPSIPELKFAIDVSRARNVACYFSHSCSPNVFVQFVLFDHYNVSYPHLMIFAMENIPPLRELSIDYGMVDEWIGQLTM

SEQ ID NO: 749 - protein, 711 aa, Zea mays
MPREGLGNFGAEEEARDGGQEGLVTEMDVEESSPSSSPMSSPAGSSDSIDLNFLPFLKREPKSEPSSPELGPLPLPVSLTQTPPQQHAAAAAPATEASVPPPPATPDLSSASMMTPLQSLPPNPDEDSLLREYYRLARLYLSSAGSGAIVPTPAPEAAAPAVVQSGAGSVVKKRRPRSSELVRVSSLGVQDQIYFRDLVRRARITFECLRGLLLRDDERAESLGLAGAAGFGVARDRRRARADMRAAALMADHDLWLNRDRRIVGPMPGISVGDAFFFRMELCVLGLHGQVQAGIDYVSAGRSASGEPIATSIIVSGGYEDDDDHGDVLVYTGHGGRDPNLHKHCVDQKLEGGNLALERSMAYGIEIRVIRAVKSRRSPIGKVYFYDGLYKVVDYWLDRGKSGFGVYKYKMLRIEGQEPMGTVNYRAAEQLKVDVFAVRPTGYFSFDISMGRETLPVALYNDVDDDQDPLLFEYLTRPIFPTSAVQGKFAEGGGGGGCDCAEICSIGCNCAGRNGGEFAYNKTGTLLRGKPLVYECGPYCRCPPSCPNRVSQKGLQHRLEVFRSRETGWGVRSLDLIKAGTFICEFSGIVLTHQQSEVMAANGDCLVRPNRFPPRWLDWGDISDVYPDYVAPDHPVIPELNFAIDVSRARNVACYFSHSCSPNVFIQFVLFDHYNVSYPHLMIFAMENIPPLRELSIDYGMVDEWTGQLTM

SEQ ID NO: 750 - protein, 933 aa, Zea mays
MFQVQAAPKIYKLLPGRPGLMFEDPFFNWFRDDTDEQWTRTIDFTPSASIGQSSILCLEVPQQCELPRIGDYFVYYKEQNLDFECRNGYSYSCGSNLVPIVKSPDYIEVPYEILFKINHLVQNGTLSGPTVDHSFFRHVSPKFEPIDHIKRALLKMTYLKSTCLNPTDWLSVQYSRIRKSRHASQKLSNISLDDGLVYVHRVQVTPAKVYFYGPEINVSNRVVRHFSADIDNFLRISFVDEDCEKLRSADLSPRSTSGNDARRTALYNRVLSVLSNGINIGDKHFEFLAFSSSQLRDNSAWMFASRQGLTASDIRKWMGDFRDIRNVAKYAARLGQSFSSSTETLKVHKSEVERIPDITNGTKYIFSDGVGKISANFAVEVAMKCKLKRFAPSVFQIRYGGYKGVVAVDTRSNHKLSLRKSMSKFQSENITLDVLAYSKYQPCFLNRQLITLLSTLGVSDNVFELKQKEALRQLNRMVTEPQAAREAVELMPMGEVTNVVKELLSCGYQPDHEPYLSMLLQTFRASKLLELKTKSRIFITQGRAMMGCLDETCTLKYGQVFVQASYSADDHRKVVVTGKVVVAKNPCLHPGDIRVLQAVDVPALHHLFDCVVFPQQGPRPHPNECSGSDLDGDIYFVSWDPHLIPSRLVDPMDYTPASAETLDHDVTIEEIQEYFTNYIVNESLGIIANAHVVFADQERMKAESPPCVQLAKLFSIAVDFPKTGVPALIPHELHVKEYPDFMEKLDKVTYESKGVIGKLYREIKKHTPHIKHFTREVARRSYDTDLIVDGYEDYITEAIEFKEEYDFRLGNLMDHYGIKSEAEIISGCILKMAKNFTKSSDADAIRMAVRSLRKEARSWFNEMSTGEDGQDAMEAKASAWYHVTYHQQYWGSYNEGYDRPHLISFPWCVYDKLVAIKQGRNLLTRMDRNLRFR

SEQ ID NO: 751 - protein, 511 aa, Zea mays
MKCIVFVKRIIVARVVVQILQNLKCLDFWRCEFLVGCHSGLRNMSRDKMSSIIEKFSSGEVNLLVATSVGEEGLDIQTCCLVVRFDLPETVNSFIQSRGRARMSKSKYVFLLERGNHSQEKLLDDYITGEIIMDKEINLRTSNDMFNCLEENIYRVNDTGASISTACSVSLLHRYCDNLPRDIFFVPSPSFFFVDDVDGIVCKLILPPNAAFRQVNGQPCPSKDEAKRDACLKACIKLHELGALTDFLLPGQGSRKIKVSTTNNSESNKDDDESFREELYEMLIPAVLRPSRCKLDSSFKLHFYYIEFIPIPADRRYQMFGLFVINRLPEESEKLDVELHLARARIVKAGIKYLGKIEFNKEEMILAHNFQEMFLKVLLDRSEFTPSYILLGNDGALDMDSTFYLLLPIKQKFYGDNMIDWPAVKRCLSSPAFQDPMGLSLHDSYLPNESLKLLGGTYNKADVIGSLVYTPHTDLFFFVDAILDGTNAKSELNGATYAEHFKQRHGVRTFF

SEQ ID NO: 752 - protein, 966 aa, Zea mays
MLEVVLDMTPPPPPPQARLHQGSSAKGGHAERRKQPLQSSVTQPKAEPAAAAAVLPVPEGGKRCRGGGRRRGRAKAPGEPRAALLAPAQAQTQAPPPRTVIGPPVPSKGLSFCRRPGFGTVGARCVVKANHFLAELPDKDLTQYDVKITPEVSSRTVNRAIMAELVRLYRASDLGMRLPAYDGRKNLYTAGTLPFDAREFVVRLADEDDGSGVPPREREYRVAIKFAARADLHHLRQFIAGRQADAPQEALQVLDIVLRELANQRYVSIGRSFYSPDIRKPQRLGDGLQSWRGFYQSIRPTQMGLSLNIDMSSTAFIEPLPVIEFVAQILGKDVISRPLSDANRIKIKKALRGVKVEVTHRGNVRRKYRISGLTTQPTHELIFPIDEQMNMKSVVEYFKEMYGFTIQHPHLPCLQVGNQKKANYLPMEACKIIEGQRYTKRLNEKQITSLLKVTCQRPREQEMDILQTVHQNDYEQDPYAKEFGINISEKLTSVEARVLPAPWLKYHDTGKEKECLPQVGQWNMVNKKVINGCKVSHWACINFSRSVPETTARGFCQELAQMCQISGMEFNSEPVMPIYSARPDQVVKALKNVYNIALNKLKGKDLELLLAILPDNNGQLYGDIKRICETDLGLISQCCLTKHVFKISKQYLANVSLKINVKMGGRNTVLLDAISWRIPLVSDIPTIIFGADVTHPETGEDSSPSIAAVVASQDWPEVTKYAGLVCAQAHRQELIQDLYKTWHDPQRGTVTGGMIRELLISFRKATGQKPLRIIFYRDGVSEGQFYQVLLYELDAIRKACASLEPNYQPPVTFVVVQKRHHTRLFANNHKDRSSMDKSGNILPGTVVDSKICHPTEFDFYLCSHAGIQGTSRPAHYHVLWDENNFTADEMQTLTNNLCYTYARCTRSVSVVPPAYYAHLAAFRARFYMEPEMLDNQTSKTSNGTSGVSVKPLPAVKEKVKRMMFYC

SEQ ID NO: 753 - protein, 984 aa, Zea mays
MAPPPPPPPPPPHARHHQGAAKGGHAERRKQPLQSSVTQPKAEPAAAAAAAVLPEGGKRCGGGGGRRRGGRGRAKAPPGEPRVALALAPPPRTVIGPPVPSKGLSFCRRPGFGTVGARCVVKANHFLAELPDKDLIQYDVKITPEVSSRTVNRAIMAELVRLYRSSDLGMRLPAYDGRKNLYTAGTLPFDAREFVVRLTDEDDGTGVPPREREYRVAIKFAARADLHHLRQFIAGRQADAPQEALQVLDIVLRELANQRYVSIGRSFYSPDIRKPQRLGDGLQSWCGFYQSIRPTQMGLSLNIGELCGLGNISCPHACDSFLFCPVAAAYMAMLTADMSSTAFIEPLPVIEFVAQILGKDVISRPLADANRIKIKKALRGVKVEVTHRGNVRRKYRISGLTTQPTHELIFPIDEQMNMKSVVEYFKEMYGFTIQHPHLPCLQVGNQKKANYLPMEACKIVEGQRYTKRLNEKQITSLLKIILYFQTVHQNGYEQDPYAKEFGINISEKLTYVEARVLPAPWLKYHDTGKEKECLPQVGQWNMVNKKVINGCKVSHWACINFSRSVPEATARGFCQELAQMCQISGMEFNSEPVMPIYSARPDQVVKALKSVYNIALNKLKGKELELLLAILPDNNGPLYGDIKRICETDLGLISQCCLTKHVFKISKQYLANVSLKINVKMGGRNTVLLDAISWSIPLVSDIPTIIFGADVTHPETGEDSSPSIAAVVASQDWPEVTKYAGLVCAQAHRQELIQDLYKTWHDPQRGTVTGGMIRELLISFRKATGQKPLRIIFYRDGVSEGQFYQVLLYELDAIRKACASLEPNYQPPVTFVVVQKRHHTRLFTNNHKDRSSMDKSGNILPGTVVDSKICHPTEFDFYLCSHAGIQGTSRPAHYHVLWDENNFTADEMQTLTNNLCYTYARCTRSVSVVPPAYYAHLAAFRARFYMEPEMSENQTSKSSNGTNGGLVKPLPAVKEKVKRVMFYC

SEQ ID NO: 754 - protein, 1013 aa, Zea mays
MASRGRGGGGGKGPSGGRGGEGRGRGIRGGGGYHHGDDGGGERGGRGDPGRGRGVGGRGRGPGGRGVDDHQQQPPPLGNTEGGGQGRGGMAVAVPPARPAAPCPLAPDAAAPAFPAAAASSSAQAPRAPTEAAGAALADGMGKLAVADDRPAAPPVPAGKPVAQGPAHQPQEAPPLSRKRIVPPPRPGLGTSGRKLAVRANHFFVEVSVNDIFHYDVLINPEPKARKTNRMLLSELVKIHGATSLAHKTPAYDGSKSLYTAGELPFKSMEFVVKLGKAGREVDYKVTIRYAARPNVYQLKQLINSQLRNTPFDAIQALDVVLRESPSLNYVTLSRSFFSKKFGDDDIGGGLECWRGYYQSLRPTQMGLSLNIDTCSTSFYQPIDVVKFVADCLQLTNPGQPFLDRDRLKLKRALRGVLVETEHQQGKRSIYRITGITSVPLAQLSFSCNEGPQLTVVEYFAQRYNVQLRYTAWPCLQSGNDSKPIYLPMEVCKIIEGQKYPRKLSDTQVANILKATCKRPQDREENIIKMVRHNNYSADKMAQVFGITVANQMANVQARVLPPPMLKYHESGKEKTVAPSLGQWNMINKKMVNGGTIHSWTCLSFSRIPLRLVDEICHELVQKCNSIGMSFNPRPVTEVQKDSHNNIEAALRDVHRRAPNLQLLIVILPDVTGYYGEIKRMCETDLGIVSQCINPKKNRNKQYFENLALKINVKAGGRNTVLERASVPNGIPFVSDVPTIIFGADVTHPTAGEESSASVGAVVASMDWPQVTTYKALVSAQAHREEIIQNLGGMIRELLISFYKRTGKKPKRIIFYRDGISEGQFNHVLLLEMDAIRKACASLEDGYLPPVTFVVIQKRHHTRLFPGVHGRRDVTDRSGNILPGTVVDTEICHPREFDFYLCSHAGIQGTSRPIHYHVLYDENRFSADGLQILTNSLCYTYARCTRAVSVVPPAYYAHLAAFRGRYYDEQGSSPAPDGTSVVGGDAAAAGDDPPACRRLPQIKENVKEVMFFC

SEQ ID NO: 755 - protein, 941 aa, Zea mays
MAYRGGGGRGGGGRDGDQQRPPHVHGRGAGGPGGGRTFVWPPPPSSTPRPVPPYHHHHHHQVPMGYRAPIVLPHQAAYGVPMAVYRGAPAPAYRVPAPASPRPRVSFSPAPPASPVTIRAPPPSPTTPPAAPTTPAPPRQPAPAPAPEPAPAPPPAPSLAALAKEVEKKLFVSETALAPAAAAAAAAAAQGTAGAGADDAASDVDLAPVSKKGLAHPARPALATVGRNVFVRANHFLVHVADNNLFHYDVAINPESKSRATNREVLNELIKLHGKTSLGGKLPAYDGRKSLYTAGSLPFESEEFVVTLVDPEKKEKESYVTVSRSFFSTTFGHRGDIGEGLECWRGYYQSLRPTQMGLSLNIDISATSFFKPVTIIKFVEEFLNLRDTSRPLFDRDRVKIKKALRGVRIETTHQQDQIRRYKITGITPIPMSQLIFPVDDKGTRKTVVQYFLDKYDYRLKYVSWPCLQAGSDSRPVYLPMEVCKIVEGQRYSKKLNDRQVTNILRATCKRPQEREKSIRDMVLHNKYADDKFAQEFGIEVSSDLVTVPARVLPPPLLKYHDSGREKTCAPSVGQWNMINKKMINGGTIDNWTCLNFSRMRPDEVQRFCMDLTHMCNATGMVVNPRPFIEVRSAAPNHIENALRDVHKRATQILAQQAVGNQLQLLIVILPEVSGSYGKIKRVCETDIGIVSQCCLPKHASRPNKQYLENVALKINVKVVASMDWPEITKYRGLVSAQPHRQEIIEDLFTVSKDPQMGHNVNGGMIRDGVSEGQFSHVLLHEMDAIRKKRHHTRLFPEVHGRRDMTDKSGNILPGTVVDQMICHPTEFDFYLCSHAGIQGTSRPTHYHVLYDENEFTADALQSLTNNLCYTYARCTRAVSVVPPAYYAHLAAFRARYYVEGESSDGGSTPGSSGQTVAREGPVEVRQLPKIKDNVKDVMFYC

SEQ ID NO: 756 - DNA, 3310 bp, Sorghum bicolor
  source 1..3310: mol_type = genomic DNA
cctcctgttcctctctcacactcccccgcttccttccctgttcgtggaaatctagggttttggaagggtttagatcgcctgctctttgccgcggcggttgttcgtgcgccgcggatttagggagggtttctgcggtgaggggttttgcgccccctggcggtgtgttcttcgtttcttcggggggttttttaccctctttggtgtcaggatcgctgcattccggtctgcgcttagagagggtcgggcagaggctttgcagctttgggtcagatacagtgctctccaaggcccactaaatggagtctcacaatggcgaggctgatgacttgcctccaccacctcctttgaatgctggtgttgaaccacttaaagctgatgaaacaaaggtgccattgaaacataggactctggtccagaggaatggctttggcagaaaggggcagcagataaaactgctaacaaatcacttcaaagtttctctcatgaatgctgcagattatttctatcattactacgtcaacttgaagtatgaagatgatacaccggttgatcgcaaagggtcgggaagaaaagttatagaaaaactgcagcagacttatgctgctgaacttgcaaataaagattttgcatatgatggtgagaagagcctgttcacaatcggtgctcttcctcaagttaaaaatgagttcactgttgttgttgatgatgtttcaactggaaagactcctgcaaatggcagtccaggaaatgacagtcctcctggaagtgacaggaaaaggatcagaaggccttacaatacaaagacgtacaaggtcgaactctcttttgcggcaagaattcctatgagtgcaatctcacaggccctcagaggtcaggaatcagagcacacgcaggaagcaattcgagtgattgacattattctgaggcagcactcagctaagcagggttgcctattagtaaggcaatcattcttccacaataatccttctaactttgttgacctgggtggtggtgtagtgggctgtagagggtttcattctagttttcgtgcaacccagagtggactttcactcaacatcgatgtgtccaccacaatgatagtgaaacctggtcctgtcattgattttctgcttgccaatcagaaagttaatcatccaggcatgattgattgggctaaggccaagcgttcactgaagaacttgaggatcaaaacaagtccagcaaaccaagaacagaagattgttggtctcagcgacagaccttgctgtgagcaattattcacactgaaacataagaatggtaatggagactctgaagagatcactgtttatgattacttcgtaaagaaccgtggcatagagctgcaatactctggtgatcttccatgtatcaatgtgggaaaaccaaagcggccaacatattttccagttgagttatgcagtcttttgcctttacaaaggtacactaaagctttgagcacacttcagaggtcatcacttgttgagaaatctaggcagaaaccacaagaaaggataggtgttttgtctgatgtactgcaaagaagcaactatgatgcagagcccatgctgaaggcctgcgggattacaattgctagaagttttaccgaagttgatggtaggatactgcagccccccaagcttaaagctggcaatggagaagacatttttacacgcaatggtagatggaacttcaacaataagaggctcattaagggtagcagtgttgagaaatgggcagtggtcaacttttctgcacgatgcaatgtcagggatcttgtccgtgatctcatcaagtgtggaggcatgaaggggattatggttgaagctccttttgatgtatttgaggagaatccttcgatgagacggtcgcctgctgtaagaagggttgaagacatgtttgaacaagtcaaaaccaagcttcctggagctccgaagtttcttttgtgtgttctagctgaaagaaagaattctgatatttatgggccttggaagaagaaatgccttgctgaatttgggatcgttacacagtgcgtggcaccaactagagtcaatgatcagtatcttacaaatgtcctactaaagataaatgcaaagctgggtggcatgaattcgttgctccaaattgaaacatccccagcaattcctcaagtatccaaggtcccaactataatcttgggaatggatgtctcccatggttctcctggacattctgatgtaccgtccattgctgctgttgttagttctcgtgaatggcctcttatctcgaaatatagagcttctgtccgcacccaatcacctaagatggaaatgattgactctttgtttaagccacgggaaactgaagatgatggtctgatccgggagtgtctgattgacttctacaccagttctgggaagaagaagcctgaccaagtcatcatcttcagggatggtgttagtgaaagtcagtttaatcaggtgctgaacattgagttgcaacaaatcatcgaggcttgcaagtttttggatgaaaaatggaatccaaagttcacgttgattattgcccagaagaatcaccacactaaattttttattcctggaaagacagaaaatgttccagctggaactgttgtggacaacaaagtttgtcatccaaggaactttgacttctacatgtgttcacatgctggaatgatcgggactacgaggccaactcattatcatatactgcatgatgagataggcttcaatcctgatgatctgcaggagctggtgcattcgctctcttacgtgtaccaaaggagcacaacagccatatcagttgttgctcccatctgctatgcacatctggcagcagctcaggtcggccagttcattaagttcgatgagatgtcggagacatcctccagccatggcggccatacttcggcgggcagcgtccctgtccaggagctacctcgtctacatgagaaagtcaggagctcgatgttcttttgctgagcctctatagcttgctgcttcggcattggcctctaagccttacttttggtggatggttgggtctgaaccctggtagtagttatgtctggtggcagtaaacgctcttggatgctgcccataaacttgtgaacttgttgcggcatttggtgcctgcctctggaagacttaatcaagtaggatgttaaatgttagtttttaagcatcgctgcagttatgttggctgtcttgttgcagtgcttggtgccctcaggaagacttggaaccttgtaggatgtcgttaaaccatccttttaagcgttgctggttctcta

SEQ ID NO: 757 - DNA, 3156 bp, Sorghum bicolor
  source 1..3156: mol_type = genomic DNA
gtttggaaagccggagggggtgagaagttttctcgccttctcggagacgtcgccatccaccccccgcttccaccactctcggcgggtcgggcagaggctttgcagctttgggtcagatacagtgctctccaaggcccactaaatggagtctcacaatggcgaggctgatgacttgcctccaccacctcctttgaatgctggtgttgaaccacttaaagctgatgaaacaaaggtgccattgaaacataggactctggtccagaggaatggctttggcagaaaggggcagcagataaaactgctaacaaatcacttcaaagtttctctcatgaatgctgcagattatttctatcattactacgtcaacttgaagtatgaagatgatacaccggttgatcgcaaagggtcgggaagaaaagttatagaaaaactgcagcagacttatgctgctgaacttgcaaataaagattttgcatatgatggtgagaagagcctgttcacaatcggtgctcttcctcaagttaaaaatgagttcactgttgttgttgatgatgtttcaactggaaagactcctgcaaatggcagtccaggaaatgacagtcctcctggaagtgacaggaaaaggatcagaaggccttacaatacaaagacgtacaaggtcgaactctcttttgcggcaagaattcctatgagtgcaatctcacaggccctcagaggtcaggaatcagagcacacgcaggaagcaattcgagtgattgacattattctgaggcagcactcagctaagcagggttgcctattagtaaggcaatcattcttccacaataatccttctaactttgttgacctgggtggtggtgtagtgggctgtagagggtttcattctagttttcgtgcaacccagagtggactttcactcaacatcgatgtgtccaccacaatgatagtgaaacctggtcctgtcattgattttctgcttgccaatcagaaagttaatcatccaggcatgattgattgggctaaggccaagcgttcactgaagaacttgaggatcaaaacaagtccagcaaaccaagaacagaagattgttggtctcagcgacagaccttgctgtgagcaattattcacactgaaacataagaatggtaatggagactctgaagagatcactgtttatgattacttcgtaaagaaccgtggcatagagctgcaatactctggtgatcttccatgtatcaatgtgggaaaaccaaagcggccaacatattttccagttgagttatgcagtcttttgcctttacaaaggtacactaaagctttgagcacacttcagaggtcatcacttgttgagaaatctaggcagaaaccacaagaaaggataggtgttttgtctgatgtactgcaaagaagcaactatgatgcagagcccatgctgaaggcctgcgggattacaattgctagaagttttaccgaagttgatggtaggatactgcagccccccaagcttaaagctggcaatggagaagacatttttacacgcaatggtagatggaacttcaacaataagaggctcattaagggtagcagtgttgagaaatgggcagtggtcaacttttctgcacgatgcaatgtcagggatcttgtccgtgatctcatcaagtgtggaggcatgaaggggattatggttgaagctccttttgatgtatttgaggagaatccttcgatgagacggtcgcctgctgtaagaagggttgaagacatgtttgaacaagtcaaaaccaagcttcctggagctccgaagtttcttttgtgtgttctagctgaaagaaagaattctgatatttatgggccttggaagaagaaatgccttgctgaatttgggatcgttacacagtgcgtggcaccaactagagtcaatgatcagtatcttacaaatgtcctactaaagataaatgcaaagctgggtggcatgaattcgttgctccaaattgaaacatccccagcaattcctcaagtatccaaggtcccaactataatcttgggaatggatgtctcccatggttctcctggacattctgatgtaccgtccattgctgctgttgttagttctcgtgaatggcctcttatctcgaaatatagagcttctgtccgcacccaatcacctaagatggaaatgattgactctttgtttaagccacgggaaactgaagatgatggtctgatccgggagtgtctgattgacttctacaccagttctgggaagaagaagcctgaccaagtcatcatcttcagggatggtgttagtgaaagtcagtttaatcaggtgctgaacattgagttgcaacaaatcatcgaggcttgcaagtttttggatgaaaaatggaatccaaagttcacgttgattattgcccagaagaatcaccacactaaattttttattcctggaaagacagaaaatgttccagctggaactgttgtggacaacaaagtttgtcatccaaggaactttgacttctacatgtgttcacatgctggaatgatcgggactacgaggccaactcattatcatatactgcatgatgagataggcttcaatcctgatgatctgcaggagctggtgcattcgctctcttacgtgtaccaaaggagcacaacagccatatcagttgttgctcccatctgctatgcacatctggcagcagctcaggtcggccagttcattaagttcgatgagatgtcggagacatcctccagccatggcggccatacttcggcgggcagcgtccctgtccaggagctacctcgtctacatgagaaagtcaggagctcgatgttcttttgctgagcctctatagcttgctgcttcggcattggcctctaagccttacttttggtggatggttgggtctgaaccctggtagtagttatgtctggtggcagtaaacgctcttggatgctgcccataaacttgtgaacttgttgcggcatttggtgcctgcctctggaagacttaatcaagtaggatgttaaatgttagtttttaagcatcgctgcagttatgttggctgtcttgttgcagtgcttggtgccctcaggaagacttggaaccttgtaggatgtcgttaaaccatccttttaagcgttgctggttctcta

SEQ ID NO: 758 - DNA, 3170 bp, Sorghum bicolor
  source 1..3170: mol_type = genomic DNA
caggcttcggggactggaggagtgggagaggagaggagcaggacctgggagacctcgcttcgcccgtcctccagtcttccttgcttttcgattttgagggtgctgcttgttttatcttaaaatggggtctcatgatggtgaggatgaagagttgccaccacccccgcccgtgccaccagatgtggttcccattaaagctgaagatgttgtgggggaaccaccagcaaacaagccaataaagccaaagagattactgatggacaggcctggtataggaagaaaagggcagctagcccagctctattcaaatcactttaaagtcgccgtgaagagcacagaagacttcttctttcactattatgtgaacctgaagtatgaggatgatcaacctgttgaaggtaaagggattggcagaaaggtgattgataaactgcagcagacatatcgcgctgagctttccaacaaggattttgcatatgacggagaaaagagcctgtttacagttggtgggcttccacaaaaaaacaatgagttcactgtcgtcttggaggacgcgtctactggaaagactgctgccaatgggagccctggcggtaatgacagtcctggaggtggtgacaggaagagagtgaggaggccataccagacgaaaactttcaaagtggagataaattttgcagcaaaggttcctatgagtgctattggtcaagtcattagaggcgaagaaacggagaactccctggaggcacttcgtgttcttgatatcatactgaggcagcattccgcagaacaaggctgccttttggttaagcaatcgtttttctacaacaacccttcaaactttgttgacttgggtggtggcgtgatgggttgccgtggatttcattcaagtttccgcggcacacagagtggactttccctgaacgttgatgtctcaacaacaatgatcgtgaagcctggccctgttattgattttcttctttctaaccagaatgttaatgatcctagcagaattgattggcaaaaggccaagcgtgctctcaagggcttgaggattagaaccactcctgcaaatgcagaattcaagatttttggtctcagcgagaggatttgtaaagaacaaacgtttccgctgaggcagagaaatggtagcaacggagattgtgataccattgatataactgtctatgactactatgcgaagaaaggaattgatctaaagtactctggtgatttgccttgtataaatacagggagggcaaagcgtccaacatattttccaatcgagctatgctgccttgttccgcttcaaagatacaccaaagctttgtctacgctacaaaggtcatcccttgttgagaagtctagacagaagcctcaagaaaggatgacagttctaaacgatgcactgcaacgcagtaactatgattctgaccccatgttgagggcatgtggcgtttcagttgctccaaaatttacccaagttgaaggaaggatccttcaagccccaaagctgaaagccggcaatggtgatgatatcttctcacgaaatggacggtggaatttcaccaataggaagttttatcaaacctgctctgtggataagtgggcggttgttaatttctctgcacgttgtgatgttcggaatctcatccgtgacctgatgaggaatgcatctgcaaagggaattcaaatggaggaaccttttgatgtgtttgaagagagcccctctatgaggcgtgcacccgtgtcgagaagagtggatgatatgtttgggcagataaaatcaaaacttcctggagctcctaggttcctcatgtgccttctccctgagaggaaaaattgcgaagtctatggtccttggaagagaaagtgcctggccgagtttggtattgtcacacagtgtctagctccaacaagagtcaatgatccgtacctgcttaatttgctgatgaagattaatgcaaagcttggtggtctgaattcgttgctgcaagttgaagcatctccatcaataccccatgtgtcggaagtacccaccatcatcttgggtatggatgtgtctcatggccatccaggacaagataggccttcagttgcagccgtggttagttctcgtcaatggcctcttatctctaaatatagagcatcagtgcacacccaatccgccagactagaaatgatgtcctccttgtttaagccacggggtactgatgatgatggcctcattagggaatcactgattgacttctacactagctctggcaagcgaaaaccagaccacattatcattttcagggatggagtcagcgaaagtcagtttacccaggtcatcaacattgaactggatcagataattgaggcatgtaagtttcttgatgagaagtggtcacccaagttcactgtgattgttgctcaaaagaaccaccacaccaagttttttcagaccggatcaccagacaatgttcttcccggaactgtcgtggacaataaagtttgccatcctaagaactttgacttctacatgtgtgcacatgctgggatgattggaacaacaaggccgacccattatcatgttctgcacgatgagataggtttctctgctgacgaaatgcaggagtttgttcattcgctctcttatgtgtatcaaaggagcacaacagccatctcagtagttgctccaatctgctatgcccaccttgctgcagcccaggtgggcacgttcctgaaattcgaggagatgtcagacacgtcctccagccagggagggcatacctcggcgggcagtgctcccgtgccggagctgcctcgcctgcatgagaaagtgaggagttccatgttcttctgctgatgtgatggtccatcaggatctgggagcgtttgaactgattttggttagcggtagtgatgtgtatgtgtgtgtgtgtatggcatgcaaccagcttggaaccttgaaggctcgcttgttgtgccaacctgacttagctgctggatgcctgaatgtagaggcttttgtaggagaaccagtcagcagtccttgtgtatgcggtgttactgtcagcagctaacatcctagtaaagtttgtctgtggtgtaatgaaccttcacttgataaccttcacttgatgctagctaagctcccctatggatcgatgatgccttgtgctgtt

SEQ ID NO: 759 - DNA, 2300 bp, Sorghum bicolor
  source 1..2300: mol_type = genomic DNA
gggccgcggctttcacgccgctcggacacccgcaacacctgaccggagagagagggaggcggagaagaaaggggaaaggggaccgaccaggcgaagccggccctcggcaatggagacctctcctcctcctcctcctcctccgccgccgccgccgcagatcgatcatcttctctcgcaattccccatcatccccaaacccgatcccgacggcccaacccctgcgcaaacccccgcccccatcgcagaacggtcggcggcgctgatgctggcgctcaccccggagctctgccaggttctccaccgggagcttgctccttcccccgacgacgatccctacttcgctcgctgccttcgccaatcccagctccacctcgaagccctcgccgccagtctccgccccccctcttcctcctcctcctcctcctccgccgccgccgccgccgcatcccttgcacgagtccttcctccgcctcctccccctcagaaggagttgcggacgcagctgcaacgagaaccaggcgcaggcggcggatccaacccctccagctccaagaagcgcgcgcgcgcctccactgaggtggtgcgcgccacccacctcagccccgcggaccatctccgctaccgcgccctcgtccgccgcgcgcgcctcaccttcgaggcgctccgcagcacctaccagcgccaggagacctccagcggcgtccgcaaccgccatgacctccgcgcctccaggcagatgctctccgctggccactggctccaccgcgaggtccgcatcgtcggcgatatccccggcgtcttcgtcggcgacgccttctactaccgcgccgagatctgcgtcgtcggcctccacaccatgcctcaggccggcatcggctacatccccggcagcctcctcaacgagggcgaccccgtcgccactagcatcgtctcctccggagggtaccttgacgacgaggacaccggcgacgtcctcgtctataccggcagcggcggccgccagcgcaaccgcgtcgaccaccacgccaaccagacgcttgagcgcggcaaccttgcgctccacaacagctacctctacggcgtggaggtgcgcgtcatccggggccacgacatcgaccaaggtccgcaccgcaaggtctatgtctacgacggcctctacagggtcattgagtccaccttcggccccggcaagtccggccacgacgtctgcaagttcaagcttgtgcgtctccccggccaggacgacctagccagcaagacctggcacaccgccaagctgctcaaggagtccatggacgccagaatccgcccgccaaggtacatctccctcgacctctccaagggggctgagcttcttcgcgtccctgtctgcaacaaggtggacaatgacaggtctcccctgctatttgagtacattgcccaacctgagtttccagtgcggccagcgcacgtgccagtcaagcagcacggcggctgccattgcgcggggggctgtggctccaagtgcagatgtgagaggaagaacggtggagagccagtgtatactgaggatgacattctggtgatggggagaccggtggtgtatgaatgcggtgctctgtgtgggtgccccatgacctgcgtgaaccgtgtgacgcagcgagggatgaagcaccggctggaggtgttccgctccattgagacaggctggggtgtcagggcgcttgacttgatacagccgggagcgtttgtgtgtgagtacactgggcatgtggttgttatggatgatcagccaggcagtgcattggagggtcgcagcatcatcgatccaaggaggtttccagagcgatggaaggagtggggagacgcctcggctgtggaaccaaacatgaagagactccagtttgcaaagtttgcaggaccaggttatgttcttgatgtgtcacataagaggaatgtggcctgctacattagccacagctgcacacctaatgtgtttcttcagtttgtattgcgtggcaatgaggacgagtcgttccctcacctgatggtttttgccatggagaccatcccacccatgcgtgagctgagcattgactatggaattgatatggagttgagtgcaatctgatgctggttctgaggcatcaatgtggggaaggcaggcttactagactttttggatgatagcgtaggcgacgattttttttttggggggaataataaccatacatgatacactggtttagttttgccctagtttgcacccttcaatagttaaattctagaattcagagtgacagagtatcaaaaggtgctca

SEQ ID NO: 760 - DNA, 2148 bp, Sorghum bicolor
  source 1..2148: mol_type = genomic DNA
ccgagcgagcgatcgatgtcgggctccggcgatcgtcgcggcggcgggcctcctggacccgatggtggctggaaaaccaaggggaagaactcgaagaaacacgggcaagtaggcgggagccaatggacaccggggagttccacaaatgcgacacctagtacagcaaggccagcatggggtggcaatggctcctcgcacccttctggaaggacttgggctcaagcttcagatcgtggtgctggcaacagatgcaatcctagaccgccaccaccaacactgcgccctgttgtgactccacctctggcaaatggttggcagtggcaatccaggcctcgtccatctggttctgaagtcgagaaggatgatgcttctccatctggttctgaccctgaggtggagaatgttgatggcaacaatgcatcagatgatgatgatgatttgagtgatgatatcagtgatgaatatgattctgatgcaagtgagaaaagttttgagactctaaaaacaaacaagtggttcaaaaaattctttgaaaaattgaatacattgagtgtggaacagataaatgaaccggctagggagtggcattgcccagcatgcaaaaatggacctggggcaattgactggtacagagggctgcaacctttaatgactcatgctagaacaaagggttctaaaagggttaggcttcacagagaattagctgcattgctgggagaggagctctctcgcaggggaacttcagtggtaccagcgggtgaacaatttgggaaatggaaaggactgcaagaaagcactgatcgggagatagtgtggccaccaatggttattgttatgaacaccttattggaaaaagatgacgatgataagtggaagggcatggggaaccaagagctccttgattattttggagaatatgcagcaactaaagcacgtcatgcatatggtccctctgggcaccgtggtatgagcgtgttaatatttgaaagctcagctgtgggctacatggaagctgaacgtctgcataggcactttgttaatcaaggtacagacaggaatgcatggcagctcaacaaggctcgattcgcacctggtgggaaaaggctgctatttggtttcttagcgagcaaagaggatatggaggcttttaacaagcattgccatggtaaaagccgtatgaagtatgagatgaagtcttacaatgagatggtcgtgatgcaaatgaaacagatgagtgaagacaaccagcaactgaattacctgaagaacaaggtggttaagacagagcagcactctaaagcagtagaagaatcattgggtgttgttagccagaagctacgtgagactatggaagagaatatatttatcaggagtaaagcaaaagagaagcacttggagtatgagcaagagatgaagtaccaggaggaattttttcatagtcaaattgaggatattcacaaggccacggaggacaaagaaaagctgtttgagaagttgctgcaggaggagcgctcaaaggctagacgatttgatgtagattctggaactaccgaagatcgcaagctaaggaaggaacatgtacagaagttcattgattgccaggtcaaggatgtggaaaagtttgaagctgagcgggatgagttgatcaaagtccacgatgagacgaagatgaggctcaagaaagagtacatggagaaggagctggagctggagaaggagctcgacgcagccctgacgggcctgatggagaagcacaagccagatagctttgaggcctccagctcgtaaaggggcttcagcggcttacctcagatcctcatcagcttggaggagcaatcttgtagatgctcctgcttatccataaaagaatgcctagacattctgtagatgttgctaaaccatggtgtccctgtggtggcagcaccgagttatatggtcgccgtagtggtatctcaatcgtattgtgtgcttcgaggatctgaacactgagcgttttgcccgtgatggcatatgggtcaaactacctggagtgtgctttggtttgaatgcgggtgttggttttgcctttcttatgccccggatcattactgattatgttgctccggtcatcaaagtgtctgattcagccatccgaggaaggtcggtttt

SEQ ID NO: 761 - DNA, 2112 bp, Sorghum bicolor
  source 1..2112: mol_type = genomic DNA
ttccgcacttccgctcactgccaaggcatctccattctccactgcaaatcgtaaaaccccacgacgctgtagcggagagaaaagggggagcgcgcgacgcgaacgcgatcgatgtcgggctccggcgatcgtcgcggcggcgggcctccgggttccgatggtggctgggaaaccatggggaggaagtcaaagaaacaagggcaagtaggtgggagacagtgggcatcatggaattccacaaatgcgacacctaacacagcaaggccagcatggggtggcaatggttcctcgcacccttctggaacgagttgggctcaagcttcagaccgtggtgctcctaacagatgcaatcctagaccgccaccacaaacagtgcgccctgttgtgactccacctctggcaaatggttggcagtggcaatccaggtctcgcacatctggttctgaagtcgagaaggatgatgctcctccatctggttctgaccctgaggtggagaatgttgatggcaacaatgcatcagatgatgaggatgatttgagtgatgatatcagcgatgactatgattctgatgcaagtgagaaaagttttgagactcgaaaaacgaacaagtggttcaaagggttctttgaagtcttgaatacattgagtgtggaacagattaatgagcaaactaggcaatggcattgcccggcatgcaaaaatggacctggggcaattgactggtacaaagggctgcaacctttaatgactcatgctagaacaaagggttctacaagggttaggctgcacagagaattggctgcattgctggaagaggagctctctcgcaggggaacttcagtgataccagcgggcgaacaatttgggaaatggaaagggctgcgagaaagcactgatcgggagatagtgtggccaccaatggttattgttatgaacaccttcttggaaaaagatgacgatgataagtggaagggaatggggaaccaagagctccttgattattttggagaatatgcagcaactaaagcacgtcatgcctatggtccctctgggcaccgtggtatgagcgtgttaatatttgaaagctcagctgtgggctacatggaagctgaacgtctgcataggcactttgttaatcaaggtaaagacaggaatgcatggcagctcaacaaggttcgattcgtacctggtgggaaaaggctgctatttggtttcttagcgagcaaagaggatatggaggcgtttaataggcattgccatggtaaaagccgcctgaagtatgagatgaagtcttacaatgagatggtggtgatgcaaatgaaacagatgagtgaagacaaccaacaactgaattacctgaagaacaaggtggttaaaacagagcagcgctctaaagcagtagaagaaactttgggtgttattacccagaagctacgtgagactatggaagagaatatatttgtcaggagtaaagcaaaagagaagcacttggaatatgagcaagagatgaagtaccaggaggaattttttcatagtcaaattgaggatattcacaaggcaacagaggataaagaaaagctgtttgagaagttgctgcaggaggagcgctcaaaggctaggcgctttgatgtagattctggaactacggaagatcgtaagctaaggaaggatcatgtacagaagttcattgattgccaggtcaaggatgtggcagagtttgaagctgagcgggatgaactgatcaaagtccacgaggagaagaagatgaagctcaagaaagagtacatggagaaggagctggagctggagaaggagctcgacgcagccctgacggtcctgatggagaagcacaagccagatagctttgaggcctaaaacattgtgtccctgtggtggcagcttgcgtgatacggagacgtgaccagcatcgcgttatattgtcgctgtagtagtatctttcagtcgtagtgtgtgtggttcgagcatctgaagttctgaacacagtgtttgcctgtgatggcatatggatcaaactacaactggagtgttatgtcatcctctatgggcgtgcgactgtcgaagtgcctaattcagctattaggattgacctgc

SEQ ID NO: 762 - DNA, 3907 bp, Sorghum bicolor
  source 1..3907: mol_type = genomic DNA
atgggatcgctgcggggcgcggcagccccgtccccggcgccgcgcgcgggcgacctggtgaccacgcaggttagcctgggcggatttgacgccaccgtcaaggcgctcgatcttgccgactttctcgagttgaaggcgggcttggtctggcgctgccgcgtcaagacctcctggaccccgccggacgcctatcccgacttccttctccccaccgtcacctccgccgccgcgcagccgccacagtacgatcgcgtgcctccgcacgccttcgtccactttgcgcgcccggagggcgcgcgcgccgccgccgacgcagcggggcggtccgagctcatcctctccgggaaacccctgcgcgccgcctccgcgcaggagagctcccttcgggcctcccgccgccgcagtgtctcgccattccgcttccctggctcacgcctcgaggtcggggatctcccggccaaggacgccttcctcgccgcctggcgcggtccggcctctgggctcgagttctccgtcgatccgttcgacgggtcttgccgcctcatcttcgcccgcgacaccgcattcaaagtccgggagttccgcgagtctgtggtcatgcgctgcgacgtcaagctcgagttccccgtacgcgacgtcgccgaagtcagggtgttccggctcgactgctcgctgctgatccggctgtcggcggcaccgctggtttattaccgcacggcggacgacgacatccacgagtccgtgccgttcgacctgctcgacgacgatgacccgtggatacggaccacggacatcacccccagtggcgcgattgggcggtgcggcgcgtatagaatcacattctcgccgcgcttctggccaaagatggaacgcgcgctggcgtacatgagggataggagggtgccgatcgttgattgcggtggtggttggggggccaggaggggcctcaccgtgcgagatgagcctgagtttggggagcgaatgcaggacctgttcttctgcgtgcagcactccgagggtctcaagtttccggtgttgttcctcgtgaatgctctggtgcacaagggagtaataaatcaacaccacctcacgcctgaattcttcggcttgctccagaggaaggaggatgatgtgaatgtggctgctttgagggaattttggggggacaaatttccagtttttgatgcatgtggcaggctgaagaatctgcaagatagggttgccaggtaccccaaacttcttcgcaacaagattggggatgacaattcagaggtgaggaggctggtagtcacgcccaccaaagcttattgcctgccaccagaagtggagcgctctaatcgtgtcatccgtcattatcgtgaagtcacagacagatttctcagggttacttttatggatgagggtatgcagctactgaacagtaatgtgctgaatttctctgctgcgcaaattgtcaaagatttgatgtcaaactcgttcctgcataagacaacagtgtacaagcgtattaaaacatttttgacagagggattccacatgtgtggtaggaagtactcatttcttgcattctcatcgaaccagctgagggacaggtcagcttggttcttcgcagaggacagaatgagaacagtggaaaccattaggaaatggatggggcggttcacaagtaagaatgtagcaaagcacgctgctcggatggggcagtgcttctcatctacatatgctacagtggtgatgcagccgcatgaggtcaatgagtgtctcgaggaagttgaacgcaatgggtacattttctctgatggaattggcaagattacgtgtgaccttgcacttgaagttgctcagaagctgcgattgacagataatcccccatccgcttaccagattaggtatgcaggcttcaagggtgttatagctgtctgggaaggagaaaatgatgggatacgactttccctgaggccgagcatgcacaagtttgagtctaaccataatgtgttagaggtggtctcatggacaaagtttcagccaggattcttaaaccgtcagattattacattactgtcctccttgaatgtcccggatgctatcttttctcaaatgcaggaagccatgttgtctaatctcaataatattttgtcggacactgatgttgcttttgacattgtaaccacctcttgtgctgagcaaggaaacactgcagcactgatgttgagtgctggcatttcacctggaactgagccacacctgaaagcaatgctgttagctataaggtcctcacagctactgggtcttttggagaagacaaggatttttgtgccgaaggggaggtggttgatgggctgccttgatgaacttgggatccttgagcaaggacagtgctttatccgggcgtcatctccatcactcaataattgtctggtaaagcatggaccaagattttcctcagcaaacaaaaatgcagagaccattgtgggtactatcgtaatggcaaagaatccatgccttcatccaggggatgtccggatccttgaagctgttgatgtgcctgaactgcatcaccttgttgattgcttggtcttccccaagaaaggtgagaggccacatgccaatgaagcatctgggagtgatcttgatggggatctctactttgtgacatgggatgaaaaccttataccacctggcaaaaagagttggaaccctatggactactccccaactgaagcaaaacaactaccgcgcgcagtatccccacatgatattgttgatttcttcttgaagaacatggtaaatgagaaactgggtccaataagcaatgctcatgttgttcacgctgatatgagcgagtatggagcaatggatgagaagtgcattcagttggcagaactagcagcaactgctgtagacttccccaagactggcaaaattgtgtcaatgccaccatcccttcggccaaaattatatcctgacttcatgggaaaggaggatgccatctcctataaatcagagaagatccttggaaggctttatcggtcaatccaagaagcctccagtggtgatttggttccagaagaaacttgcacattaaacgatttgccttatgatgcagatatggaagttcctggtgcaactgattttctctcaagtgcttgggagtgcaagtgctcatatgaaacacaactgaatgcactgctcaaccaatatggtgtgcgcactgaagcagagcttgttacagagcacatatggtcgcttcccaaatacagcagcagaaaacagggggacataaaggagagattgaagaatgcatactctgctctccacaaggacttcaggagcattttcgaaagctttgttacagatcaaactgagatctctgatgatgagaaaattcggttttatgagatgaaggcctctgcatggtaccaggtaacctaccaccccaaatgggtccaaaagtcaagggaaatgctcaaacctgactttgaggacatgccagcaaggcttagctttgcatggatcggggtcgagcacctggcacggattaagataaggtgccatggagaagtgaaagtggacagccgaaggcccgttgagaggctcgcagcctacatatctgggagcatgtgagctggcgtgaagctccatgcaatagtgaagcaagaccactctgcccctttctgccatgccatctgaactctgaagcatggctccgcctagtcacttcgtttttttgttttgttttttttacgaaattacatagttgggacacagacactctatatgcacgtacaccgtatacttatctctatgaaccaacattaatgcatttaccagagtcgaacttgtccaaactctattactaccagaatgtttgtggatataaagtattagttcatggtgtctgaattcc

SEQ ID NO: 763 - DNA, 3663 bp, Sorghum bicolor
  source 1..3663: mol_type = genomic DNA
atggtggtgtcgccggcggagccagtgactacccgtgtcagtgtgggcggctttgactctcgcttcacctcgccgcgcgaactcgccgactacttggaggccgtggccggccgggtctggcgctgccgggtcaagacctcctgcacgccgcccaactcctaccctgacttccagtgcctcccactactccccgcggcgaacgcgcaccagccgccgccgcattattcgtccagggcgcggcgacgccgagctccagacggtgaagacgacggcgcgctcgcgttccaggccgcgccgacgccgtacaatctggtgcccccgcacgccttcgtgcacttcgtgcacccggaggccgcgcgccgcgccgccaggtccgggatcctcgtgcgcgcctcctcctcgtcccagaacaagagcagcgccgccgtccgagaccgcgcggtgcggcgccagaacgccaagccgttccgcttcacgaacgcgcgcgtcgaggtgggcaacctctgggcgccggacgccttcgtcgtctcctggcgctgcccggggaactccggctccagcgccagctccggcctcgacttcgtcgtcgacccgttggacggcagctgtcggctgctgttctcccgtgacaccgcgttcgcgttccctgcctcccgcgaggccgcggtggtgctgcgctgcgacttcaaggttgagtttttcgtcgacgacatcgccgagctcctggtgttcccgaccgatgactcgctgctgctccggctctcggccgcgcccctgctgtactaccgcacggcggcagatggtgtccaccagtcggtgccttttgacttgctggacgacgacgacgacgatccatggatacggaccaccgacatcaccgctagtggagccattggccggtgctggatgtacaggatctccttcaagacgtggttctggccaaagatgaaggacgcactggcgtacatgaaggagaagagggtgccggccgtggtctgcgacattgggtcgccggggttcagggtgcacgacgagccggagtttgggaagccaatgcaggaccttttcttgtgcgtgcagcatgtcgaggagctccagttttcagtcttgttcttggttaatgtgctggtgcataaggggatagtgaacgagcaccagctcacgtccaaattcttctctttgctcaagagagaagaggagcaagtgaatgtggctgcactgacggagctgttaggagagaattctcaggtgtttgatgtatgctggaggctgaaaaatgtgcaggattgggttgccaagaatcccaaactaattcatcctcgcagcaggggcaaggttgctggtgattataatgctgtggtgcggaggctggtgatcactcccaccagggcatattgtatgccgccacaagtagagcgctctaaccgcgtcattcggcactatcatcatgtggcagatcggttcttgagggtaacctttatggatgaaggtatgcagctgctgaacaacaatgcactcagcttccatgccgcaccgattgtccagagcatgatgtcaaaattgttccagcataagacaagaatttacaggcgtgtgcatacacttatgacaaagggtttccacttgtgtggtaggaagtactctttccttgcattctcatcgaaccagatgaaggacaggtcagcttggttcttcgcagaggagggaacaacaactgctgcaaccattagggagtggatgggacagttcccaagtaggaatgtcgcgaagcatgctgctcggatggggctgtgtttcacatcttcatatgcaacggttgtgacacggccgaatgaggttaatgagttgcttgaggatatcgagcgcaatggatacaatttctctgatgggattggcaagatcacaccggaccttgcaatcgaagttgcggcgaggttgccactgatagataggtaccctccatctgcgtaccagattagatatgcaggattcaagggtgttatagctgtctggccaggacaaaatgatgggatacggctttcccttaggccaagcatgaggaaatttgagtctacccactctgtgatagaagtagtatcctggacaaaattccaacccgcattcttgaaccgtcagattataatattgctgatgtccttgggtgtcccagaagctatattttgggaaatgcaggaggcgatgcttaagaatctcgacagaattttgtcagacagagagattgcttacaaggttgtaacaaacagttgccctgagcgtggaaccatcgcaagactgatgctgagtgctggatttagtcctgcaaccgagccacacctgaaggcaatgcttttggctataaagtcctcacagctgaagggtcttttgaagaaaacaaagatttttgtgcccaagggaaggtggctgatgggctgcctggatgaacttggaatccttgagcaggggcaatgctttatccaggcttcatctctatcaatcaacaatcatttcatgaagcatggctcaagattttcctcagcaaacaagaatgcagtgacaattgtaggtacagttgtggttgcaaagaacccatgccttcatccaggggatgtacgtgttcttgaagcagttgatgtgcctgaactgcatcaccttgttgattgcttggtcttcccaaagaaaggtgagaggccacaccccaatgaagcttccgggagtgatcttgacggggacgtctactttgtgacatgggataaaaatcttgtacctccggggaaaaggagctggaaggctatggactactctcctgctgaagcaaaacagctacaacgaagagtacttcagcatgatctcattgatttcttcttgaagaacatggcaagtgagaacattggtcggataagcaatgctcatgttgtccatgctgacattagcgagtacggagcaatggatgagaaatgtattcagctagctgaactagcagccactgcagtggactttcccaagaccggcaaaattgttagaatgccaccatcccttcgcccaacaaaataccctgacttcatggaaaaggatgatgccatctcctataaatcagaaaagatcattggaaagctttaccggacggttagatattatatccttggaatgcccttggaaagtttgatcaaagatggcatgccagcttacgatatcgacctggaagttcctggtgcatcgcatttcttcctagatgcctggcaatggaaatgtgcatacgaatcgcggctgaatgcgctgctcaatcagtacagcgggtgcaccgaagcagagcttgtgacaggggtgatctggtcgcttgccgatggaaggaaaaggaagaagcatgaggcaaacgagaagttcagccatgcatatcctgaactccaccaggagttccgacgtgtctttgaaaatattgcagcagatcaagataggatgtctgatgaaaagaaaaatctagtgtatgagatgaaggcctccgcgtggtaccaggtaacgtatcacccagaatggatcagattctcaagggaaaaggagccgcatggtgaggaaaggccagcaagactcagtttcccctggatcgccatagattacttggcgtgtataaagatgaggtgccgtggacaagcaaagcattttacttga

SEQ ID NO: 764 - DNA, 3720 bp, Sorghum bicolor
  source 1..3720: mol_type = genomic DNA
atggcggctcacaatcgcagtcgaagccccgagtcaactcgccgtcgtgctcatcttcatcgctctctcaagccatccaagcccaaccaacaccatcctcgtgaacgttgtcgacaaaccgcaggccacccgttgccaggatgcaatttcgctatggtgtggccgacagggcttgcgacgcgggcgatcctgaccggcttcgacgccggcctctcggcgcgtggcctcgcagatgacttggagcatgtggcaggcacggtctggcgctgccgggtcaagacttccatcacgccgcctaagtcctacccggacttccatctacctgccatccttgctgccgcggtgctccacccggacgggccgtcgcggcacggtcgcgtggcccctcacgccttcgtccacttcgagcagctcaaggctgcgaaccacgccggtgacttcttcaagatgcgaatctctgcgcagaacacctacctactacatggccgagcggcctgcccgcgagacggtggcaccgacatgaggcgcccgatgctcttcccggactcgtgtgtcgagtttggcgacatcgtgccgcccgacaccttcttcgtcgcctggcgcgggaccgaccactccgcctcggcagttgacttcatcgtcgacccgtccgtcggttgctgccggctgctgttctctcgcgacactgccttcacgttccccgacctctgccgtcgccccacagtggtgctgtgctgtgacatcaagctcgagttctccgtcagcaatgtcgctgaggtcctggtgttcgaggctgatgactcgctgatcctacggctctcggccgcgcccctcgtgtactaccgcacggcaggcgacgacgtccaagatcgcgtgcccttccacctgatcgacactgacgacgacccgtggatacgaaccaccgatgtcaccccaagtggtgcaatcggccggtgctcggcgtatcgggtctccttcggagcaatgttctggccaactatgaggaccgcactgaagtacatggagaggcagggggtgcctgttgacgttcgagatagccgttggctggggttcaccgtgcttgaggagccggacttcgggcggccaatgcagcacgtgttcttctccctgcggcaagatgaagacctgtggtttccggagctgtacttggttaatgtgctgatccacaataggatagtcaatctgcaccagctgacgtctgagttcttcagtttgctgaggagagcacatgaagatgtcaatgttgctgcgttgacagaattgtttggtgcaaagcttcaagtttgtagtaatccatgctcgaggttgaagaacgcgcaggatagggcgaccaagaatctcaatcttctctttcatggcagcagcagaaagcttggtgatttcaatgctgaggtgcgaaggctgatcatcactcccaccaggacatactgtatgccacctcaactggagcgctctaaccgcgttacccggcattatcatcaattgtcagatcgcttcttgagagttgcttttgtggatgagggtatgctgccactgaacgctaatgcattgagcctccaagtggtgcctcttgttaaggacttgatgtccagccctacccaacagatgacaacagtttacaggcgtgtccaaacaatcttgacagagggattcaccatgtgcggcaggaaatactcgttccttgcattttcaacgagccagctgaagcaaaagtcagcttggttctttgctgaggatggaacaacaactgtcgcaagcatgaaggagtggatggggcagttcccgattaggaatcctgcaaagcacgctgctcgaatggggctgtgcttcacatcttcgtatgcaacggtgacaatgcagccttgtgaggtcgatgagtatcttgaggatgtcattcataatggatacaatttctctgatggaattgggatgatcacgcaggacctcgcgttggaagttgccaagaggttacaactaacagatatctacgccccatccacataccagattagatatgcagggttcaagggtgttgtagctgtctcgacgggacaaaatgatgggatgcggatgtctcttaggccaagcatgaggaagtttgagtctgcacactctgtgttagaagtgctgtcctggacaaagtttcagccatctttcttgaaccgccagattataacattgctgaccagcttgggtgtcccggatgctgttttttggcaaatgcaggaagcgatgctaggtaatctcaaaaggattttatcagacaacaatgtggcgtatgaggtcgtgacaaactcatgtcctgagcatggaagtactgcaggactgatgctgagtgctggctttgctcctgcaactgagccacacctgagggcaatgctattggccatctgcgcctcacagatgcagggtcttttggataaaacaaggatttttgtgccaaagggaaggtggttgatgggctgtcttgatgaacttgggatccttgagcaaggacaatgttttatccaggtctcaacaccatcactcaacaactgttacgtgaaccgtggttcgatatttccatcggaatacaaaaataatgcagagattattgttggtacagttgtaatggcgaagaacccatgccttcatccaggggatgttcgtatccttgaagcggtggatgtccctgaactgcatcaccttgttgattgcttggtcttcccccaaaaaggggagagaccacacgccaatgaagcttctggtagcgatcttgatggcgacatctattttgtgacgtgggatgaaaatcttgtacctcctgggagacagagcggcacccctatggactacttcccggctaaaacgaaacaactaccacgtgaagtacatcaatctgatatcattgatttctacttggagagcatggtaaacgacaaccttggtcgaatatgcaatgctcatgttgttcatgctgatcggagcgatgatggagcaatggatccgaagtgcattcagttggccaaacttgcagctattgctgtggactccgcaaagactggggaaattgtgagaatgccaccatccctttcaccaaaagaatatcctgacttcatgggaaagggggatgccatctcctacaaatcaaaaaagatccttggaaggctctatcgatcaattctaagggaaaatggcgatgattttgtgtcacaaggtacatgcatttcaaatgagactccatatgacattgatctagaagttcctggtgccttaagttttcttgaggatgcttggcaatgtaagtgcctgtacgaagcacaactaaataccctgctcagtcaatatggtctgcgtagtgaggctgagcttgtgacaggggagatatggccactagtcggatataacaagtatcaatatcaattaaaagagaggatcaactatgcatattccaaactccaccaagagttccgaagtatctttgaaagcattgatatctcctattgtgacaacaaaaacctagcatatgagatgaaggcatctgcatggtaccaagtaacgtatcaccccgaattcatccgattaagggagcctgatgatgagaaaacacctgcaagacttagttttgcatggattgcagttgattacttggcacaaataaagaagaagtgtcatggagaaatgaaagttgaagagggaaggtcagcctacattttctaa

SEQ ID NO: 765 - DNA, 3756 bp, Sorghum bicolor
  source 1..3756: mol_type = genomic DNA
atggcggcgcacagccgccgcagtcgcagtcgcagccccgagtcggctcgccgtcgtgctcatcttcaccgctctctcaagccatccaagcctacccaacaccaccttcacgaaagccgccgcctgcaaaccgcagaccgcccgccgctgggacgcaacaacttcgccgccgtggcgtggccgacggagccggcgacgcgggtggtcctgaccggcttcgacgccggcctctcggcgcgtggcctcgccgacgacctagagcatttggccggcacggtctggcggtgccgggtcaagacttccgtcacgccgcccgagtcctacccggatttccagcttcccgtccaccctgccgacgacgacgacgcagcggtgttccaccaccaggacgagccgtcgcggcacggtgtcgtggcccctcacgccttcgtccacttcgagcaccccaacgccgctgaccgcgccggccacttcttcaggaagcgcgtccccgcgcagagcagctacctactacatggccgggcggcccgcccgccgcgggacggcggcactgacgacaccagggggcggccgatgctgttcccggactcgcacgtcgaggtcggcgacgtcgtggcgcccggcaccttcctcgtcgcctggcgcgggaccgacgacgactccgcctccgcctcggcactcgacttcgtcgtcgacccgtccgccggttgctgccggctgctgttcgcccgcgacactgcgttcacgttccccgatttccaccgccgcccggccgtgctgctgtgctgcgacgtcaaggtcgagttctccgtcgccgacgtcgccgaggtcctggcgttcgaggcagatgactcgctgctcctgcggctctccgccgcgcccctcgtgtactacagaacggcgggcgatgatgtccatgaccgcgtgccattccaccagatcgacgttgacgacgacccgtggatacggaccaccgacgtcaccccaagcggcgcgatcggccggtgctcggcgtatcgggtctccttcgcggcgaggttctggccaacgatgagggctgcgctggagtacatgaagaagcagggggtgcccgtcgacgtctgtgacagccggtgccggggggtcaccgtgcttgaggagccggacttcgggaggccaatgctggacgtcttcttctccctgcggcacgacgaaggcctgcggtttccggagttgtacttggttaatgtgctgatccacaacgggatagtcaatccacaccagctgacgtccgagttcttcagtttgctgaggagggcacaggaagatgtgaatgtggctgcgttgacagaattgttcggcacaaagcttcatcaagtttgtaatgatccatgctcaaggttgaagaacgcacaggttagggctgccaagaatctcaatcttctctcaaacagtagcagcagaaagtttggtgattacaatgtttttgaggtgcggagactgatcataactccaacaagagcatactgtatgccacctcaagtggagcgctctaaccgcgttacccggcattatcgtcaagtgtcagatcgcttcttgagggttacttttgttgatgagggtatgctgccgctgaactctcatgcattgagcctccatgtggtgccttttgttaaggactcgatgtccagctcgtcccaacagatgacaacagtttacaggcgtgtccaaacaatcttgacagagggattcaccatgtgcggcaggaaatactcgttccttgcattctcaacgagccagctgaagcaaaagtcagcttggttctttgctgaggatggaacaacaactgtcgcaagcatgaaggagtggatggggcagttcccgattaggaatcccgcgaagcacgctgctcgaatggggctgtgcttcacatcttcgtatgcaacggtgacaatgcagccttgtgaggtcaatgagtatcttgaggatgtcattcataatggatacaatttctctgatggaattgggataatcacgcaggacctcgcgttggaagttgccaagaggttaccactaacagatatctacgccccatccgcgtaccagattagatatgcagggttcaagggtgttgtagctgtctcgccaagacataatgatgggatgcggatgatgtctcttaggccaagcatgaggaagtttgagtctgtacaccctgtgatagaagtggtgtcgtggacaaagtttcagccagctttcttgaaccgccagattataacattgctgaccagcttgggtgtcccagatgatgttttttggcaaatgcaggaagcaatgctaggtaatctcaaaaggattttgtcaaacaccgatgtggcgtacaagattgtgacaagttcctgtcctgagcatggaagtaccgcagggctgatgctgactgctggctttgctcctgcaactgagccacacctgagagcaatgctattggctatctgtgcctcacagatgaagggtcttttggacaaaacgtggatttttgtgcccaagggaaggtggttgatgggctgtcttgatgaacttgggatccttgagcaaggacagtgttttatccgggtctcaacaccatcactcaacaaccattacatgaatcgtggttcaatatctccgtcggaatacaaaaataatgcagagattattgttggtacagttgtaatggcgaagaacccatgccttcatccaggggatgtccgtatccttgaagcggtggatgtgcctgaactgcatcaccttgttgattgcttggtcttcccaaagaaaggggagaggccacactccaatgaagcttctgggagtgatcttgatggcgacgtctactttgtgacgtgggatgaaaatcttgtacctcccgggagaaagagttgcacgcctatggactactccccatctaaatcaaaacaactaccacgggaagtacatcaacaagataccattgatttctacttggagagcatggtaaatgacaaccttggtcgaatatgcaatgctcatgtcgctcatgctgatcggagtgatgatggagcaatggatacgaagtgtgttgagttggctgaacttgcagctattgctgtggactccgcaaagactggagaaattgtaaaaatgccaccatccctttcaccaaaagaatatcctgacttcatgggaaaggaagatgccatctcctacaaatcaaaaaagatccttggaaggctctatcgatcaattctaatggaaaatagtggtgatttgctgtcacaagtcacatgcatttcaaatgagaatcaatacgacactgatctagaagttcctggtgccttgagttttcttgaggatgcttggaaatgcaagtgcttgtacgaagcacagctaaataccctgctcaatcaatttggtgtgcacagtgaggctgagcttgtgacaggggagatatggtcacttgttggatataacaagaagtatcaatatcaattaaaagagaggctgaactatgcatattccaaactccaccaagagttccgaagtatctttgaaagcattgatgtctcctatggtgacagcaaaaacctagcatatgagatgaaggcatccgcatggtaccaagtaacgtatcaccctgaatttatccgattaagggagcttgatgatgagaaaacacccgcaagacttagttttgcatggattccagttgattacttggcacaaataaagaaaaaagtgtcatggagaaatgaaagttga

SEQ ID NO: 766 - DNA, 3408 bp, Sorghum bicolor
  source 1..3408: mol_type = genomic DNA
atgtcgatggcggctcccgcgccgggcgccacggccacggtgcgggtagccaacatcccggcctcggccatcgccgccgagctgctcgccttctttgactccgccgtcaccaccaccggcgcggccttcgcttgcgagatcgccgccgcccaccgcggctggctcagccgcggccacggctccgtccagtttgactcctccgccgccgccatccatgccatcgacctcgcctcctcgggccgcctgccccctttcctcggctcctgcctctccgtctcccccgcccacgccgacctcctgccccgcgcgcctgacctctccctccgcgccgccgacgcgggcctcattctaggcaaccgcgtcgccgagcgagagctggaggcggcctactcctgggacggcgtgcgggccgaggtcatcccgaggaagcggcgtgtggacctctacctgaagcaggattcccggagctacaagcttgaggttctctttgaggacatcagggagtgctttgggtgccaccttgatgggacgggcgccatcttgctgcagctgacttatgcaccaagaatatacactgcaatttctgggtcaacagttaaatcgaggtttacagatgaccgctttcatgcatgcaaggaggatgccaaatttgcatgggtcagagcactagattttacacctaataactctttcggcgagtgttccactcttgtcctgaaactgagcaaaggtgtaccagtatcagatattcttgaaagtttacccttctcaggagaattagaggaattggccatttcttcgatgcttgcatttggctcctcctccaatgtggttcctcttgttgactgcccgaatggcttttccgtgccttatgaagttcttttccgtctgaactctcttgttcacatggggaagctagttgccaggcatgttaatgctgatctgtttaaagtccttgaagagctgtcaattgatactttaaggagaatatttgagaaaatgagcaaattaaaatctacctgctatgaacctttgcaattcatcagacatgaggctcatagcatgagtaagagcaagaaagcctttttgtccaacaagaaggacggtggaaaattgatgaggtgttacagaattcacatcacaccatcaaaaatatactgcttgggacctgaggaagaagtttcaaattacgtggttaagtaccactctgagtatgcttctgactttgctcgagttacttttgttgatgaagactggagcaagctttctcccaatgcattatcagctagaactgaacaaggtttcttttctacacctttgaaaactggcctgtatcatcgtattctctccattctaaaggaaggattttgcattggcccaaaaaaatatgaatttttggccttttcagcaagtcaacttcgtggtaattctgtttggatgtttgcttcaaataattctttgactgctgagagtataaggaggtggatgggccacttcgaagatatccgttcagtctccaagtgtgcagctagaatgggccaactgtttagctcctccaggcaaacatttgaaatctcatcatatgatgtagaagtaattccagatattgaagtcacaagtgatggcactaaatatatattttcagatggtatcgggaagatttctactagatttgccagacagattgccaagttatttggattagaccctgctcaccctccttctgcttttcaaataaggtatgggggctataaaggagtcatcactattgaccctacttcctttttcaacctttctctacgacctagtatgaagaagtttgagtcgaagagcactatgctgaacattacaaattggagcaagtctcagccatgttacgtgaaccgtgaaattatttctcttctttcgacattggggataaaggatgaagtatttgaatcgatgcaacaagatgacatgcacgaatcagacggaatgctaacaaataaagaagccgctttgtctgtcctagggaaaattggtggtgctgataccaagacagcttctgagatggtgctgcaaggctatgaaccaagttcagagccttacctgttaatgattcttaaagcccatcgggctaataggctgaccgacataagaactaggtgtaagattcatgtccagaaaggccgtgttcttattggttgtttggatgaaacctgcacattagactatggccaagtttacatcagaattacaaagaatcgcaaggagcagaagtacagtgaacagccattcttttgcaatgatgatggcaaaacagctgtaattgttggaaaagttgcagtcacaaaaaacccatgtctccatcctggtgatgtcagagtacttgaagctgtatatgaccctgcattggatgctaggggtcttattgattgtgttgtatttcctcagagaggggaaaggcctcatccaaatgaatgctcgggtggcgatttggatggcgacctcttctttattacttgggatgacaaactgattccggagaaggttgatgcacctatggactacactgcaacgaggccacgcataatggaccatgctgttacactcgaggaaattcagaagcacttcgtcaattacatgataaatgacgccctcggtgttatctccaccgcccacttgatccacgcagaccgtaatccgctgaaagctcgcagccccgagtgcctccagctggccgctctgcactccatggcggtcgactttgccaagacgggagctccagccgagatgcccgtggcgctgaggccccgggagttcccggacttcatggaacggtgggagaggccaatgtacgtctccaccagcgtcctcggcaagctctaccgcgcagccctgcgccatgaggagaacgcagaagcgctcctgcctgcgggcccaccgcgctgcgtgtacgacccggacctcgaggtcgctggtttcgacaagttcctggacaccgcggaggagcagtacgaggtgtacgccgagaagctgggcaccctgatgacatactactccgcggagcacgaggacgagatcctgacgggcaacatccggaacaagctggtgtatctgcggcgggacaacaagcgctacttcgagatgaaggaccggatcatcgccgccgtcgacgccctgcacgctgaggtgagggggtggctcagggctcgcaaggaggatgacgcgtccaagttggcgtcggcgtggtaccacgtgacgtaccacccggaccgccgcggcgagaagcggttctggagcttcccgtgggtcgcctgcgacaccctgctggcgatcaaggcggcgcgtaggtgccggaagcgggtggaagacgccgctgcgcccatggactgcgacgcctcctagacggaggtgccactgtcaaag

SEQ ID NO: 767 - DNA, 4012 bp, Sorghum bicolor
  source 1..4012: mol_type = genomic DNA
atggaagagctacagaaggacggtgggcaacaatcaaatggctctgattctgaaccagaagctatggtgttggatgacaatggagcgggaaaatcccatagcatggatggaaacagggattctcctgtagatgtcgatgaaggccagtcatctatggatgtggatactaagggaaaaccatccctcaatgatgatgttaatggaaagtcttctgagccatattccaatgctccaattgacctgagtgtggaaagcctagagaagttttgcaaagaagcatcaaggtccttctttgatgaagttggtctgattagccatcagataaattcctacaatgactttgtctcgcatgggcttcaggagctttttgattcgctgggggaagtgattgttgaacctggctatgatccttcaaagaaaggatcaggtggctggaagcatgccatcatcaagtttgggagagtgaagcttgaaaagcctgtgttttggactggcaaggatgaaggttctgttgattttaagccttggcatgctcgtctccagaatatgacatatgcttcaagacttatagtagaagtgaatattcaggtttattctttggagaaaagtgacaaatctaaaacaggaaatgatggttttgttcaaaaaagggacttcatgaatgaaactcattggatatttattggcctccttccggttatggtgaaatcaaacttatgtttgttgcatagtctcaaggaaagcgagtgcttgttcgatgcaggtggatactttttggtcaagggaatggagaaggtattcattgctcaagagctaagatgtctaaagaggctctggattattgaccgtccttgctggatgatctcttttatgtctgaaatgaagcgtagacgtatatatattaaactagttgaatctacaaggagtgaagatttcagtgggagcaaaatcatttccatttcctttttgtatgcgacaatgccagtttggttgttgttctttgcacttggaatatcatcagataaggaagcctttgatgtgatagatatgcaagattgcgatgcttctgttatcaacacaatatctgcaactatcaaagaatctgatgaattgtgtgaagggtttcgtaaatcagataaagctcgtcaatatgttgatgagttggtaaaaagttcgagatttcctccagcggagtcctttgatgactatattgctaggtttctctttcctgatattagtggaaatagaaacaaagcacttttcttagggtacatggtgaaatgtctgctaatggcttttactgggaagcgtaaatgtgataataaggatgatttcaggaacaagaggctggacctacctggtgaattgcttggaagggaacttagggcacatcttaggctggcagagaagcgcatggttaaggccattcaaagagatttgaatagtgaccgtgagttacaagatcttgaacgctatatagatgcatcgattgttactaatggtctaagtcgtgccttttccactggttcttggtgccatccctacaaaagagctgaacggtgctcaggaattgttgcgactctaaggagaactaatcctcttcaaatgatgtctgacttgaggaaaacccggcagcgggttgcttatgctgggaaagctggtgatgcaagatatccgaatccatcgtattggggaaagctgtgttttatgtccactccggatggtgaaaactgtggacttgtgaaaaatctagctgttactgctattgttagctcaagggtggtgcagcccttgattgagagcttcatttcttgtggaatgagtaagctgaatgacattcctactgagcacattcaaagaatggataagatctttttgaatggcaattgggtgggatcttgtaaagattcagcttcatttgtatttcgattgaggtgcatgagacgcagcagtctgattgatcctcaggttgaaattaaaagggacaagcaccacaaggaggttcgtgtgttttctgatgctggacgaatcctcagaccccttcttgtggttgagaatcttaaaaaaatcagaaaaccaaaggggcgctcattctctttccaggaattaatgcaacaggaaataattgagttcattggtgttgaagaggaggaagatatacaatgtgcgtggggaatcaggcatttgtttgagagtgaaggagcgatatctagttatactcactgtgaactggatccttcctttcttctgggattaagctgcggtatcattccttttgcaaaccataattttgctcggagggtattataccaatctgaaaaacactcacaacaagctattggttactcaacgacaaatccacacatcagagttgatactctttctcatcaactatattatcctcagaggcctcttttcaaaacagttatagccgactgtcttggcagatcagattatactacttttggaagaaaagatgacttcatgagaccagaatacttcaatggacaaaatgcaattgtagcagtcaatgttcatcaggggtttaaccaagaggattccctggttatgaatagggcttctcttgaacgaggtatgtttaggactgaacacctcaggagctataaggcagatgtagaaaacaaggatggaaccaaacgactgaaattgaaggaaaagatagactttggaaaaacagaaagcaaaagaggacgtgttgacaatcttgatgatgatggcttaccttacattggtgcaagtcttcagaccaatgacatcgttattggaaaagtctcagaatctggagaagaccacagtattaagctgaagcatacagaaaagggaatggttcagaaagtattgctttcagcaaatgatgaagggaagaattttgctgtggttactctaagacaggttcggacaccttgccttggagataagttttccagcatgcatggccaaaaaggtgttgttggatttctagaatctcaagagaacttcccatttactcacaaaggtatagtcccggatattgtgataaatccgcatgccttcccgacacgtcaaactcctggacagctgcttgaagctgctctggggaagggaatagcctgcaaaggtacaatgagatatgcgacaccattcaccacagcatcagttgatgttattgcagaacagttgcacagggctggttattcacgatggggaaccgagaatgtactaaatggccgaactggtgaaagaatgcaatccttgattttcatgggccccaccttttatcagaggctgattcatatgtctgaagataaggtgaaattccgtaatactgggccagtgcaccccctcacgaggcagcctgttgccgacaggaaaaggtttggtggagttaagtttggagaaatggagcgtgattgcctcctcgcccatgggtcagctgccaacctgcatgaacgcctcttcatgcttagtgacttctcccagatgcacatctgccagacatgcgagcgtgtggctaatgttgtcatgaggtctgtctccggaggcaaaaagatccgtggcccctactgcggtttctgcaagtcttcggagaacatagtgaggatcaatgtgccctatggcgcaaagctgctctaccaggaactcttcagcatggggatctgcctcaagtttgataccgaagtctgctagaagctgctctacgcctctaccaggaactcttcagcatggggatctgcctcaagtttgataccgaagtctgctagaacttgtagacctgattgtatccagacatccagttatgtacataacgttaccctatgaggatagaggatatcgtactggcagctatgtgaaaattcctgccgatgtgtgctgctggcatagcaaggatgggcgagtgtgatgtagtgaaacggcactggcaggtgggtatctccaagcaggtgtggggatctacctctgctttgagaataaactctgttgaaactagaaaacctgtagcgtttatgctgtt

SEQ ID NO: 768 - DNA, 4272 bp, Sorghum bicolor
  source 1..4272: mol_type = genomic DNA
gcaccgcaacaccgccagaaccctccgtccctccctctcccacccactctacgaaggaacaagtgaagcgcgacggcggtcgcgccgcccgccgcctcccaccaccgctggcgccacgctgcctcgccgcaccgccagctgtccgccgaccccgctctccgcgtccgcgtccggcctaccgcagcttccccttcacccaccaggtataagctgccagtgcttgtgtaatggaagagctacagaaggacagtgggcaaccatcaaatggctctgattctgagccagaagctatggtattggatgacaatggagcaggaaaatcccgtagcatggagggaaacgaggattctcctatagatgccgatgtaggcaaggattctcctatagatgtcaatgaaggccagtcctctatggatgtggatattaaggcaaaatcttctctcaatgatgatgttaatggaaagtcttcttccgagccatattccaatgctccaatcgacatgagtgtggaaagcctagagaaattttgcaaagaagcatcaaggtccttctttgatgaagttggtctgataagccatcagataaattcctacaatgagtttgtctcacatgggctccaggagctttttgattcgctgggggaagtgatcgttgaacctggctatgatccttcaaagaaaggatcaggtggctggaagcatgccatcataaagtttgggagagtgaagcttgaaaagcctgtgttttggaccggcaaagatgaaggttctgttgattttaaaccttggcatgctcgtctccagaatatgacatatgcttcaagacttaaagtagaagtgactattcaggtttattctttggagaaaagtgacaaatcgaaaacagggaatgagggttttgttcaaaaaaggaacttcatgaatgaaactcattggatatttattggcctccttccggttatggtgaaatcaaacttatgtttgttgcatagtctcaaggaaagtgagtgcctgtttgatgcaggtggatactttttggtcaagggaatggagaaggtattcattgctcaagagcaaagatgtctaaagaggctttgggttagtgatcgtcctttctggatgatctcttttatgcatgaaatcaagcgtagacgtatatatattaaactagttgaatctacaaggagtgaagatttcagtgggagcaaagtcatttccatttcctttttgtatgcgacaatgccagtctggttgttgttctttgcacttggaatatcatcagataaggaagcctttgatgtgatagatatgcaagattgcgatgcttctgttatcaacacgatatctgcaaccatcaaagaatctgatgaactgtgtaaaggctttcgtaaatcagataaagctcgtcaatatgttgatgagttggtaaaaagttcgagatttcctccggcggagtcctttgatgactatgttgctaggtttctctttcctgatattaatggaaataggaacaaagcatttttcttagggtacatggtgaaatgtctgctaatggcttttactgggaagcgtaaatgtgataataaggatgatttcaggaacaagaggctggacctacctggtgaattgcttggaagggaacttagggcgcaacttaggctgttagagaggcgcatggttaaggccattcaaagagatttaaataatgaccgcgagttacaagatcttgaacgttatatagatgcatcgattgttactaatggtctaaatcgtgccttttccactggttcttggtgccatccctacaaaagagctgaacggtgctcaggaattgttgcgactctaagaagaactaatcctcttcaaatgatgtctgacttgaggaaaacccggcagcgggttgcttatgctgggaaagctggtgatgcaagatatccaaatccatcctattggggaaagctgtgttttctgtccactccggatggtgaaaactgtggacttgtaaaaaatctagctgttactgctattgttagctcaagggtggggcagcccttgattgagagcttcatttcttgtggaatgagtaagctgaatgacattcctacggagcacattcaaagaatggataagatctttttgaatggcaattgggtgggatcttgtaaagattcagcttcatttgtatttcgattgaggtgcatgagacgcagcagtatgattgatcctcaggttgaaattaaaagggacaagcaccacaaggaggttcgtgtgttctctgatgcagggagaatcctcagaccccttcttgtggttgagaatcttaataaaatcagaaaaccgaaagggcgttcattctctttccaggaattaatgcaacaagaaataattgagttcattggtgttgaagaggaagaagatatacaatgtgcgtggggaatcaggcatttgtttgagagtgaaggagcgatatctagttatactcactgtgagctggatccttcctttcttatgggattaagctgtggtatcattccttttgcaaaccacaattttgctcggagggtgttgtaccaatctgaaaaacactcgcaacaagctattgggtactcaacgacaaatccacacatcagagttgatactctttctcatcaactttattatcctcagaggcctcttttcaaaacagttatagccgactgtcttggcagatcagattatactgcttttggaagaaaagatgactacacgagaccagaatattttaatggacaaaatgcaatcgtagcagtgaatgttcatcaggggtttaaccaagaggattccctggttatgaatagggcttctcttgaacgaggtatgtttaggactgaacacctcaggagctataagacagatgtagaaaacaaggatggaaccaaacgattgaaattgaaggaaaagatagactttggaaaaacagaaagcaaaagagggcgtgttgacaatcttgatgatgatggcttaccttacattggtgcaagtcttcagaccaatgacatcgtcattggaaaagtctcagaatctggagaagaccacagtattaagctgaagcatacagaaaagggaatggttcagaaagtattgctttcagcaaatgatgaagggaagaattttgctgttgttactttaagacaggttcggacaccttgccttggagataagttttccagcatgcatggccaaaaaggtgttgttggttttctagaatctcaagagaacttcccatttactcacgaaggtatagtcccagatattgtgataaatccacatgccttcccaacacgtcaaactcccggacaactgcttgaagctgctctggggaagggaatagcctgcaaaggtacaatgagatatgcaacaccattcaccacagcatctgttgacgttattgcagagcagttgcacaaggctggttattcacggtggggagctgagaatgttctaaatggccgaactggtgaaagaatgcaatccttggttttcatgggtcctaccttttaccagaggctgattcatatgtccgaagataaggtgaaattccgtaacactgggccggtgcaccccctcacgaggcagcctgttgctgacaggaaaaggtttggcggagttaagtttggagaaatggagcgtgattgcctcctcgcccacgggtcagctgccaacctgcatgagcgcctcttcatgcttagtgacttctcccagatgcacatctgccagacatgcgagcgtgtggccaatgttgtcatgaggtctgttcctggaggcaaaaagatccgtggcccctactgcggcttctgcaagtcttcggagaacatagtgaggatcaatgtgccctatggcgcgaagctgctctaccaggaactcttcagcatggggatctgcctcaagtttgacaccgaagtctgctaggaacttgtagacctgcttgtatccagacatccagttatgtacataaagttagcctatgaggatatcgtactgggctactggcagctatgtgaaaactcgtgccgatgtgtgatgctggcatagcaaaggatgggcgagtctgatggagtgcaacggcactggcaggtgggtttctccaacccgatgtggggatctaccactgctctgctttgaggataaactctgttgaaactagaaaccttgtagcgtttatgtgctgtttcgccctgctcgtctgataaactatgctcaagtgaatgaacacttgtttcctgtttcttgcttg

SEQ ID NO: 769 - DNA, 3916 bp, Sorghum bicolor
  source 1..3916: mol_type = genomic DNA
gcgggaaccacaaatggatggtgatcagtcaactgttgtcttagatactgatatgatggattgcctgaatttcgatggctatggagatgttgaagatccccgcaaggagggtgcaaaaggggagcggcagccttctggcaaagttgatgaactgcagtctactatggatgtcgatttgacatgcatagcttatgtggaagatgaagggaatgaaaaacagaatgctatggatgtggatttgaaagaaatactgcctgaggaagatgaagggaaaggaaaggcttcttcagacataccctcacatgtaccagttgattttgatgttgcaagcctcgagaagttttgcagagaagcatcaagatcatttttcagtgcaactggactagttagccatcagattaactcatacaatcaatttgtctcccatggactccaagacctctttgattctcttggggaaatcactgtggagcctgattatgacccttcaaataaaagtggtgcttggaaacatgccactataaaatttggtagggttgagcttagtgagccagtgtttatggttgacaaccttgaccttgaacagcaagatctcaaatttaagccaagacatgcccgcctccagcggatgacatatgcgtctaggatgaatgtagaaatgactgctcaggtttatatactcgacaaaagtgacaaagccaagactggtaaggatacacatgttcatagaagagagataatgacagaaactaaacaagtcagcatgggattgttacctgtgatggtgaagtcaaatttgtgctggctgcataaacttcaagaaagtgattgccagtttgattttggtggctactttttgatcaaaggaacagagaaggtattcattgctgaagagcaaagatttttatcaaggatttggatcacagactaccccagttgggatgcaagttacctgtctcaaatcaaaagagaaaagatcaatataaaacttgttccgtccaaacgcaatgaaagctgcaaagtcataaccatttacttcatgggtacgattataccaatttgggtagtattttttgcacttggtgtatcgtcagacaaggaagcttttgatatgattgatatcctagactgtgatgcttccatagtcaacataatatcatcaactattaaagaatctcatgaagaatttgaaggcttccgcgctccaggtagagcctgtcaatatgttgataagctgatcagaaaatcaaagtttccgcccaaagaatcctttgatgagtatgtttgtaggtatatgtttcctagtgtcaatggggttaggagcaaggcacttttcttgggttacatggtaaaatgtctgctaatggcatactctggcaatcgaaaatgtgataataaggatgatttccgtaacaagaggctaggtctcgcctgccaattgcttcggagagaactctggactcatattaagagagcagaatggcgcatggttaagctcatgcagagagatttgagcaatgatggcaacttgcaagaccttaggcgttatgtggatgcgtcaattattaccaatggattgaatcgggctttctccactggttcttggcggcatccttatctaaaagcaaggtgttcaggggttgtagcaacccttcggagaacaaatccacttcaaatgatgtctgatctgaggaagacgcgacagtgggttgcgtattctggagcggttggagatgcaagatacccgaatccatccttctggggaaaattgtgttttttgtccactccggatggtgaaaaatgtggatttgtgaaaaaccttgctgttactgctgtggttagctctgtagtgaggaaaccattgattgatacatttgtttcttgtggaatgaagaaactggacgatatttcactacaagatatttctgggaaagacaggatcttcttgaatggaagcttgcttggagtatgtgcagacccacatgaattgactttgcgtttaagaagtttgaggcgtagcaagctaattgatcctcaggttgaaatcaaaagggacaagcaccataaagaagttcgtgtactttgtgatccaggcagaattctaagaccacttcttgtagttgaaaatctaagaagaatcacaagaccaaaagatggactatactcttttcaggaacttatagatcaaaacatagttgaactgattggtgttgaagaagaggaggatatccaatgtgcgtctggaattagacatctattctcaggggagaaagaagacaggtcttctggctatactcattgtgaacttgatccttctttcttgctagggttgagttgcagtctcattccctttgccaaccatgataatggtaagagggttctgatgcaagctgaaaaaatatcacagcaggctattggctactcccctacaaattctcacactaggctcgacaccctttcacatcaaatcttctatccacaaagacccttgtttaaaactgtggtgtcctatggtcttggaaaggcagagacagcctacagctttggacgaaaagatgactttaatacaccagaatatttcaatggccaaaatgcaatagtctcaatcaatgttcatcagggattcaaccaagaagattctctggtcctgaatagggcctctttagagcgtggcatgtttcgtacactacatttaaagagctataaagcacaagtcgaaaacaaagagatcacaaggcgtctcaaacacagggaaagtatcaattttggtaaagtgcaaagcaagagggggaaggttgacagtctggacagtgagggtttaccatatgttggagcaagtcttcaaagtggtgacattgtcattggaaaggtctcagagtctggtgaagatcatagtgccaaactgatgcatactgagaaagggatggtggataaggtagttctttcagcgaatgatgatggggtgaactttgcaactgttactctaagacagtctcgctcgccatgcgttggagacaagtttgccagcatgcatggacaaaaaggagtggttggcctattggattcccaggagaatttcccatttacttgccaagggatagttccagacatcgtcataaacccacatggttttccaactcgtcaaactcctggtcagttgcttgaagctgctctggggaaggggattgccatgggtgggaaggtcaggtatgcaacaccgttcaccactccaaccgtggacgtgatcaccgaacagctgcacaaggctgggttttcaaggtggggcgaggagagcgtcctgaacgggcagaccggcgagaggatgaagtccctggtgttcatgggaccgaccttctaccagcggctggtgcacatggccgaggacaaggtgaagttccggaacacggggccagtgcacccggtgacgcggcagccggtggaggacaagaagcggttcggcggcgtcaagttcggggagatggagcgcgactgcatgctcgcccacggcgccgccgccaacctccacgagcggctcttcacgctcagcgacttctcgcagatgcacatctgccaggcctgccagcgggtggccaacgtgatcatgaggcccgccgagggcggcagcaagaaggtgcacggcccctactgcatgttctgccgctccgcggagcgcatcgtccgcgtcaacgtgccctacggctccaagctgctgtaccaggagctcttctgcatgggcatctgcctcaagtttgacaccgagatccgctagaacaacgccatgccatttcatcagcccgtctctttttgaagccgtagactacatgcatttgcaattgcaacttggttgcctaggatattggtgattgaagtcgaccgtagactacatacatttttgtaactttgttgcctaggaaga

SEQ ID NO: 770 - DNA, 4524 bp, Sorghum bicolor
  source 1..4524: mol_type = genomic DNA
ggagattctcctcgccccttccactagagcagccgacggcccgaggcggcgagctcgtcggcgactgaccaccgccggagcagccgccgcctcctgctgggcctgtaccacagctcgcacgagcggctccggtggctgcgccagccgccactgtgctgtcggagggcggctcggaggacttgcgccccctcggcttctctgcgcccgccgcccctccgccggcgtgatcgaggatggagctacatcgtgaacttcctgaagctactctgaatgccataaaatttgatctcatgaccagtacagatatggaaaaattgagtagcatgagcgtgatcgaagtgagtgatgtcacaagtcccaagttaggactaccaaatgcttcgccgcagtgtgagacctgtggatcgaaaagtggacgcgactgtgatgggcatttcggtgtgactaaactggcggcaacagtgcacaatccatattttatcgatgacgttgttcactttctaaaccaaatatgtcctggctgtctcagtccaagggaaggcataaatatgaagaaggatggctctaaactttaccctagcgtaatctttaagacgctgtcaagtccaagagtattattgtccaagagtaaacttcacagaagccctagcgtgatggaaagaatttcaattgttgcagaagctgctgaaagagtgtctaatagatcaaagggtaaaggtttgcttgaaggcctgccccaggattattgggattttgtaccttctgagaataagcaagtccagtcaaatatgaccaagataatattgtcgccctaccaagtcttccacatgttgaagaaaagtgaccctgaacttatcaaacaatttgtttcaaggcgggagctattgtttctatcatgtttaccagtaactcctaattgccatcgtgttgtagaaatcggatatgggctttcagatggacgtgtaacatttttgtactctaaaaagacagatggggagacatctacagatccatctggaatgaaatggctaaaggatgctgttctcagcaaaagatcagataatgcttttaggagtactatggttggggacccaaaaattaagttatgggaaattggcattcctgaagatttagcctcaaacttggttgtttctgaccacgttaattcgtataattttgaaaatataaatttgaagtgcaacctgcaccttctaaccaaggaagaactatttattcggcgaaatggaaagttaatgtttcttcggaaggcagatcagctagaaattggtgacattgcctatagaccactgcaggatggtgatcttattctcatcaacaggcctccttcagtccatcaacattcactgattgcattctctgcaaaaattttaccaattcactctgtcgtatcaatcaatccactatgctgtacaccttttctgggagattttgatggcatgaagttcagttgtgataggatgttacacatcttaaacggtgaagtgcttacctgctcactggggtcgtcttggctgcaaaataacacgtctggtcttttctctgtcatgttcaaacagtatggttgcaaggcacttgacttcctttcttctgcacaagaagtattatgtgagttcttaaccatgaggggcttaagtgtatctctttcagacatgttctcagaccattactcaaggagaaaactaactgagggagttaagctggcattggatgaagctgaagaagctttccgaatcaagcaaatattgctagatccaattaacataccagttctgaagtgtcaggatgaaactgaagatgtaacttacagacaatctgattgtatccagaacaatccatcagttatcagatcttcaatcatggcatttaaagatgtcttcagtgatctattaaaaatggtgcaacaacatgttagtaatgataattcaatgatggtgatgattaatgcaggaagcaagggtagcatgttgaaatatgctcaacaaactgcatgtgttggtcttcaacttccagcaagcaaatttcccttcagagttccttcccaactctcatgcattagatggaatagacagaaatcgttgaactatgaagctgagggtactaatgaacgtgtgggaggtcaaaacctttatgctgtgatcaggaattccttcattgagggtttaaatccattggaatgtcttctgcatgctatatctggcagggcaaacttctttagcgaaaatgctgatgtgccagggacattgacaagaaaattaatgtatcacttgagagatatacacgttgcttatgatggaactgttagaagttcttatgggcagcaaatagtgcaattctcttatgatagtgctgatgatccggaagtatttaagtgtcacaaggctacaaattcaggggaccatattggtttgcttttcctgtcgaggcatttgaagaagtatagatatggtctggaatatgcatctctagaagttaaaaaccatcttgagcaagaaatgatgaagaaaaaaagattaggattgagatttgttatagaagaacttacaaaagagtataacgccaccagagatcagctaaagaatgcaatcccatcaatttgtatctcaaggagaaaatgtgtggtaggtgatgagggtgttaaaatttcagcatgctgcatcgctgtcgtagcactagctgaacctaactccatgtctcagttggacactatcaagaaaagggtgattccaatcatactggatacactgctgaaaggttttttggaatttaaggatgttgagatccagtgtcaacatgatggtgaacttcttgtgaaagtttgtatgtctcaccattgcaaaggtgggaggttctgggctactctacagaatgcttgcattccagtaatggagttgattgactgggagctgagtcgaccaagcaacgtagctgatattttctgttcatatggcatagactcagcgtggaaatactttgttgaatctttgaaatcagcaactactgatattgggaggaatattcgtcgggagcacttactggttattgcagatagcatgtctgtaactgggcagttccatgcaataagcagtcatggtttaaagcagcagcgcactcgtttatcaatctcgtctccattttctgaagcatgtttttctaggcctgcacaaagttttatagatgctgcaaagcaatgttcagtggacaatctgtgtggaagtctagatgcaattgcttggggcaaagagcctttcaatgggacgtcagggccttttgaaattatgcattcgggaaagccacatgaaccagaacaagacgagagcatctatgatttcctacgcagccctaaagttcagaatgttgaaaagaatcatttggatacgcgtagacaaagtactgaaaatgcttccatatgtaggttagcatgcaagtctaaaggcagtgcgactgtcaatggtgttgccataacttccgaccaggactttcttcatgctaaagtcagtatatgggataacattattgatatgcgcgcttccttacagaacatgctaagagagtacccgttaaatggatatgtgatggagccagataaatcaaaattaattgaggccctgaaatttcatcccagaggggctgaaaagatcggtgttggagtaagagaaattaaggtcgggttgaatcctaatcacccgggtacaaggtgcttcattttgctcaggaacgatgataccactgaggacttttcttaccacaagtgtgttcacggtgctgcaaattctatctcacctcaactcggaagttatttgaagaaactatatcatagagcataagatacaacattagttgcaccagtgctcctggcaatatcttgtcctgatcagaccatattaccaacttcttagaaggaactagctgtcacattttaggatgctcaaattgctcaaaacaagtataataacaggctgtaagcaggctgaatgctgatgtggatgagagagaggggggggggaggagagagagagatagcttacagccatcagccggccgtattattagccctgctctcagagaatgaatcagcctaagatcatgtctctccctagcatgtattgaaactgaagggatctgatgctcctctgggattagggtgtatgtcaactcaactcaactcaatgggtctttgggattagggtgtatgtcaactcaactcaactcaattggactatggacggcgggcctgaaagagtcatttactctggtttcatgcctccatctctgtagtctgtagtatactagcctgcgtgtgtttcattttctgcgtgttttctattgtgaagatattctgacaccagaatatgatggcgtgaaataatcattcatttgtttgcaactgttggtggcacaaaatgcaataggtgttaccatcatcgttgtataattgcccctcaggcatgctactgcaatgaaccaatgatcattgaatatttcatgttgatgcaatttgaggtc

SEQ ID NO: 771 - DNA, 1665 bp, Sorghum bicolor
  source 1..1665: mol_type = genomic DNA
atgcggacactgtttatcagcaaagggtcaggtttttcatctcgcagcgttctgacaggtgacccatacattgggttaggtgtagtagggcttccttctgaagtagctaagcggatgacctttgaagaacaggtcacggacataaacattaacagactgcaggaggtggtagacaagggactctgcttgacctacagagatggtcaagcaacttatgctataactgttggatcaaaagggcacacaacacttaaagttggtcaaactatcagtaggagaattgttgatggggatgttgtgttcctcaataggccgcccagcacacataagcattctcttcaagctttctacgcatatgtgcatgatgatcatacagtaaaaatcaatcctctcatgtgcggccccttttctgctgacttcgatggtgattgtgtgcatatatattatccgcaatcgcttgctgcaaaagctgaagccttggagctttttagtgttgaaagacaactaatcagttcccacagtgggaaggttaacctccagctaggtaacgactgtttggtagctatgaaggctatgtctgacagaacagtgttacacaaggaactagcaaaccagctggcaatgtttgtgccattctcacttctggcccctgctgtaatgaagccaattccgtcttggacaatcacacagatagtgcaaggtgcattaccagctaaattgacttgccaaggggacacacacttggttagggacagcacaatcataaagctggatcttgacaaagaatctgttcaggactcattcccagatttggtgtcctccatccttcgtgagaagggtccaagagaggctctgcaatttctgaatgtgctggagccattgttgatggagtttttagttctcggcggtttgagtataagtctgcgggattttaatgttcccaaggctctattggaggaagcacaaaagaacattcagaatcagtcccttgttcttgagcagtcaaggtgttctacgagtcaattcgtagaattacgagtcgaaaacaatttaaaaagtgtcaaacagcagatttcagattatgttgggaaattctctggccttgggttgcttattgatccaaaaaaggaagcctcaatggcaaaagtagtacaacaagttggttttgttggcttgcaactgtaccgtgaaggtaaattgtactcgaggcgcttggtagaggactgcttttcaagctttgtgaataaacactcagccattggagatgagtattcaccagaagcttttggtctggtgcaaagttcatattttcatggtctgaatccgtatgaagaactggtgcatgctatatgtactagagaaactatgatccgctcctctagagggctgtcagaacctggaactttgtttaagaatttaatggccatcttgagggatgtagttatatgttatgatggaactgtgagaaacatttgtagcaattccatcattcaacttaagtatggggaagatgatgaagctgattcttcaagtgctgtacctcctggtgaacctgtgggtgtcttagctgccacagctatctcaaaccctgcatacaaggccgtcttggattcctcccaaagtaacaatgcttcttgggagtcaatgaaggtagtaaagttataa

SEQ ID NO: 772 - DNA, 1665 bp, Sorghum bicolor; identical to SEQ ID NO: 771
  source 1..1665: mol_type = genomic DNA

SEQ ID NO: 773 - DNA, 588 bp, Sorghum bicolor
  source 1..588: mol_type = genomic DNA
gcacctttccggtcaataacagttagagatacagttggggatctcccacccgtggaaaatggcgccagcaagccaacaatacagtatgggagtgaaccagtgtcatggttccagaagaagatcagagacagcaccgtgttgctgaatgaccacatatccaaggagatgaacgagctgaatctcatcaggtgcaagcacattccaaagcgacctggctgcgactggcatgagctaccggatgagaaggtgaagctgtcaactgggcaaatggtggaccttataccctggtgcctgcccaacactgccaaaagacacaatcaatggaaagggctctatgggaggctggactgggagggcaacttccccacatccgtgaccgatccccagcctatgggcaaggtcggcatgtgcttccaccctgagcaggacaggatcgtcactgttcgtgagtgtgccaggtctcagggcttccctgacagctaccgtttcgcgggcagcatccagtgcaagcacaggcagatcggcaatgccgtgccgcctccgcttgcctacgcgctcgggaggaagctcaaggaagccatcgacggc

SEQ ID NO: 774 - DNA, 4359 bp, Sorghum bicolor
  source 1..4359: mol_type = genomic DNA
atgctgaccaatgaattttcaggaacaagaagatgcagagcaaagccacaaaagaaggaaaaggaatccacagaaaacagcaaactggagaatggatctcaggatgcaacagaagaggtgcatcatggagtcgaaaaaggtgatggacatgttacccgcaagagaccaaggagagcagcagcgtgttctgatttcaaagagaaatccatacgcttatccgaaaaaaaatctgttgtcatggtcaagaagaatcggatggaggaagaagaaatagatgctgtgagtctgacaaaacttggaccagaagatccaccaccttgccggaagttgattgatttcatcttgcatgatgcagaagggaacccacagccctttgaaatgtcagaaattgatgacttcttcataacagctcttatcatgcccatggatgatgatcttgaaaaagagcgtgaaagaggagtacgatgtgaaggatttgggcgaattgaggactggaatatttctggttatgatgaagtgtgtgaagggacagcggaagaagaagatgatgatgcaaaattagctagattacttcaacaagaagaagaatggaaaatgatgaagaaacagaggggtaggcgtggaacaccatcccagaaaaatgtctatataaaaataagtgaagctgagattgccaatgactatccccttcctgcatactataagccatttagccaagaaatggatgaatacatatttgatagcgatgacagtatattttctgatgatgtgccagtgaggatactcaataactggactctgtacaatgcagattccaggcttatatctttggaattgatccctatgaaatcaggagcagaaaatgatgtggttgtctttggatctggtttcatgagagatgatgatggcagttgctgttctacagctgagtctgtgaaatcgtcgtcttcctccagcaaagctgaccaacaggatgctggagtccctatttatttgagcccaatcaaagaatggcttatagagtttggtggatcaatgatttgtataaccattcggactgatgtggcctggtacaagctacgccaaccaacaaaacaatatgctccatggtgtgagcctgtactgaaaacagcaaggcttgctgttagcatcatcaccctgttaaaagagcagagtcgtgcctcaaaactttcttttgctgatgtcatcaaaaaagtagctgaatttgacaaagggaatcctgcatttatatcttctaacatcgcacttgttgagaggtatattgtggtgcatggacagataatattgcagcagtttgcagattttccagatgagactatccgccggagtgcatttgttagtggtcttttattgaagatggaacagaggaggcatacaaagctagttatgaagaagaaaactcaagtaatgaggggagagaatctgaatccaagtgcagcaatgggtccggcatcgaggagaaaagcgatgcgtgcaacaacaaccaggttgatcaacagaatctggagtgattactatgcacatcatttccctgaagattccaaggagggagatggaaatgaagcaaaagaagttgatgatgaacaagaagaaaatgaagatgaggatgctgaagatgaagggcagattgaagaggataagatctcaaagactccaccatcaacacggtcccgaaagttgctatcacaaacttgtaaggaaataagatgggaaggtgaaacatctgggaaaacatcgtctggagaaactctttacaaatgtgcttatgttagagaactcagaatacctgttggtggaacagtggtgctagaagatgattcaggagacacagtcatgtgttttgttgagtacatgtttcagaaaagtggtggtgcaaaaatggttcacgggaggattctgcaaaaaggttcacataccattcttgacaatgctgcaaatgagagggaggttttcttaactaatgattgtttagaattcaaattagatgacatcaaggaattggtaagtgttgatatccaatcgagaccttggggtcacaagtatagaaaagagaattctgaaactgataaagttgagcaggcgaaagcagaagagagaaagaaaaagggcctgcccatggtatatttctgcaaaagcttatactggcctgagaagggtgccttctttgccctcccccgtgataaaatgggtcttggtagtggtgtatgtagttcttgtgaacatatagagccagattctgatgaattgaaagtactttcgaagaccagctttgtctacagaaaggttacatataatgtcaatgactttttatacataaggcctgattttttctctgaagatgaggatcgtgcaaccttcaaggctggccgaaatgtgggtctaaagccctatgcagtttgtcaaatactggccatccctgaaggagctggatctaaaaaactcaatccagcatcagcaaatataagtgctagaagattttatagaccagatgacatttcgacagccaaagcctatgcatctgatatcagagaggtctactatagtgaagatgtaattgatgtgcctgtggatatgatagagggaaaatgtgaggttagaaagaagaatgatcttgcaagttcagaccttccagtgatgtttgaacatgtatttttctgtgaacttatatatgaccgtgccagtggagctctcaagcagttgcctccaaatgttaggtttatgtccatggtgcaaaaggcaacaattgcttcgaaaaagaacaaaggaaagcagatctgtgagactgatcaaatagattcaggtaaatggttggatgtgccaaaagagaaccgtctagctacgcttgacatttttgctggctgtggaggtttatcagaaggtctgcagcaagctggtgtatcttttacaaaatgggcaattgaatatgaagagcctgctggtgaagcatttagcaaaaatcatccagaggctgtggtctttgtagataactgcaatgttattctaaaggcaattatggataaatgtggggatactgatgactgcatttcaacttctgaagctgctgaacaagcagcaaaacttcctgaactgaacattaataaccttccagtccctggtgaagtagaattcataaatggtggtcctccgtgtcagggattctctgggatgaatagattcaaccaaagcccttggagtaaagttcagtgtgagatgattctagcattcctctcattcgcagagtatttccgtcccagattctttcttttagaaaatgttcggaactttgtttcattcaacaaagggcagaccttccgattagcagttgcatctcttctggagatgggataccaggtccggtttggaattctagaagcaggggcttttggtgttgctcagtccaggaaaagggcattcatttgggctgctgcacctggagagatgcttcctgattggccagagccgatgcatgtgtttgctagccctgagctgaagataacactgcctgatggccaatactatgcagctgccagaagcactgctggtggagcgcctttccgggcgattactgttagagatacaattggggatctgcctaaagtggaaaatggtgccagcaaactcacacttgagtacggaggtgagcccgtgtcctggttccagaagaagataagagggaatatgatggtactgaatgatcacatatccaaggagatgaatgagctgaacctcataaggtgccaacacattccgaaacgaccaggttgtgactggcatgacctaccagacgagaaggtgaagctgtctaatgggcagatggctgacctgataccttggtgcctgcccaacacagccaagagacataatcagtggaaagggctgtacgggaggctggactgggaaggcaacttccccacatctgtcacagacccccagccaatgggcaaggttggcatgtgcttccatcctgaccaggacaggatcattacggtccgagaatgcgctcggtctcagggctttcctgacagctatgagtttgcgggcaacatccagaacaagcaccggcagattggcaatgctgtgcccccgcctcttgcctatgcgctcgggaggaagctgaaggaagctgttgacaacaagcgtcaggaagctggcgtgggcgtccctgcaccatgagaagcttcccttccatggctcatgaagccaaacgctgaggtcgtctttagaaacagcgaagggcagagtagcctgtgatgtcatgtctaaactgcagtaacttagttaatcatggtttcagtcttatggaccccctgagtgtatatgctagcgaagtgttgattg

SEQ ID NO: 775 - DNA, 2671 bp, Sorghum bicolor
  source 1..2671: mol_type = genomic DNA
ccccagtcccccacgcccaaaaccccaagtgcctttctcgccgcttccgactccgccatgccaccatagatccagctagggcggcgtcgttgcgttcaatcctgtgcgagagaacgcgaatcgccgccggcttgatattggccagggctttctccgcccaattgcatcaggtctcgccgtcatttgcagcgaccgtgctctaattggggcgaaaaggaatcttatctgctgaatccccgagctccggcgatggattttgacatggacgactacatagacccctacgaggaggctgaggctgaggctgccgcgggcgaggacgacgactccgacgaccccgacgaggacgactcggatgcggagagcgactacgaggagaagtcgttcggcctcctcaagtccggcaagcaccgggtgcgcaacccggacggcaccttccgctgccccttctgccccggcaagaagaagcaggggtacaagatcaaggacctcctccagcacgccgacggtatcggcgtctccagcaagcaccgccgccacggccgcgagcgcgccaaccaccgcgccttcgcgcgctttgtccgcaccgatccggacttcgcggaagacctcgtcggtatcactggcattcaaggtgccattacaaccacccctgctgataagaatggtggcagtgccaatggcgacgggaaggccaaggctaatggagatactgctggatccagttccgtggcggcgaaagtgggtccgccacaggaggttgagaggtttgcttggccgtgggcttgtgtgcttgcagccggggcagggttcaatcctgaggagtttgctgatagagtagcggtgtttagtttggttgaggttgtgcctttgtttgttgatgagatggaagtcacagaaacctttgcaatcgtgaggtttaccaatgattggagtggattcaatgacgcgcttacgcttgagaaccattttggtgtcaataagctagggaagaaggagtttgagacgagagacagtggtctaggttccgtggagggagatggcggcaaaggtgaagtcaaggtttatgggtgggttgcccgagccgaggactatgatgcaacgagtgtggtaggaagattcttgagaaagcacaccgtcctgaaaacaatagatgaggtttccaagactgaattagagaaatcaggggagatggtggcaatactggcatcccagatcgaggaaaagaaccgatacttgcaggatttggagacaaagaagaatgcgacagaactctccatctcaaggcttgaggacgacaacaggaaactgcatgaggcatataatgaagaaatgcgcaatcttcatcgcagggctcgtgaaaatgctatgcggattttccaagagaatgaaaacttgaggattgacttagaaaataagaggagagaactgaacttacgagctaaggagcttgaaaaaatgtcagctgagaatgctaatgacaggaagacactcgatgatgagaagcagaaggcaaaatatgataatagtgaacttgagttagctagcatagagcagcagagggctgatgcagatgttctgaagctattggctgaccaggagagggaaaaggaagaggtacttgctagaatgcttcagctagaaaaggagctgcatgagaagcagcagcttgagcttgaagtagaacggttgaatggtacactccaggtgatgaaacatttagagggagatgatgacgggggagatatccatgagaagatggagaagctgagtgtaagatttgagcatgaaaagaagcgcctggaggatttgagtggagatctcgtgagaaaagagcgtgaaagtaatgatgagctacaagtggcccgaaaagaactgataaagggtttggaggaagagctggatgggcagacagctattgggatcaaaaggatgggggaactcgatgaaaagcctttcctaaatgcatgtaagagaaaatatggaaagggtgaataccagataaaagcagcagagctagtcacaaattggcaggaggaactaaagaagccatcctggcatccttttaagatggttgaggttaacggagaaaataaggaaattctggttgacgatgatgcaaaactgaagcacctatggattgagtacggcgacgatgtgtgtaatgcggtgaagactgcactgatggagataaacgagtataacccaagtgggaggtatgtagtgcccgagctctggaacttcaggaaaggtagaaaggcaacgatgaaggaggtgctcaagtacctgttcagtcagatggacacgacgaccaagcgcaggaggggctgaggaggcgccccgaggccgagaagccaataagtagcgcctttacgctgctctgtcagtcgtgtgctgctcgatcttctagttagtggtagtctggcataataagtgttcgtaatcaaggcttaggtatgcatcatgttcatgctgttgccgggcaggcgtcctaaaaacctatgtgatcgttgaactgactactgagtaatctttcgtgctgctattattgttcgggtgtaaatagtttggtgcctgctccttcgtggctttctcgtgtgtgtaatcatttgaccgttcatttgtaaatcattgaatcatcatgctgccttataatcagtaggggctttct

SEQ ID NO: 776 - DNA, 1731 bp, Sorghum bicolor
  source 1..1731: mol_type = genomic DNA
atggcggacagggtcggtggcagcgacgacggagacaagtccgagtggaatagtgacggtgaggtggcgaggagcctcgatggcgctggctcgccaattgcgccctcgaggaacaagttaaaagatgctcctggcccgtccctgctggtcaatggagcagggccatctgcctctttggtggaggactttgtagggatgggtcttattaaggggaatggggatggtggtgcagagtcattactagagctccttctggcatacaaggcgataggcaatgacccttcattggataaatcctctgcttctgtttgtggcccccggaccatttgtgatgacaaagacattcttgcgaattgggatgcgcatgatgctagtacgagcagtgacagggatcatgcatctgatgattctggtgatgaggatttcctacagggcttgtcacagaaggatgaaaaaattgagtccttagtgagaatgggctttcctaaagatgaagcagaaatggccattgtcagatgtgggcaggatgcacctatgtctgttttgattgatttaatctatagttcagaagcttcagaagatggttactatggcaatttctctggccatgaggatgattcttttggaggaagaaaggaaaagagaaagagatctgaagatgcagaacaaggcagtagccatgatgagccgatgcctctcccaaacccaatggttgggtttaacctgccaaatgtgagcttaagatcagtggacagatctctaccatcaaaggctattgggccacctttcttctactatgagaatgtagccattgctccaaagggtgtctggacgacaatatcacagttcttatatgacatccaacctgagtttgtggattctaggttcttatgtgctgctgccaggaaaagaggttacgtacataacttgccaattgagaacaggtcacctctccttcccttacccccaaagacaatatttgaggccttcccccatactaaaaagtggtggccctcatgggaccctagaaaacagttcaactgcctcctgaccagtatggctaaacctaagttaacggaacagattcaccatgctcttgcaaaatgtaaagatccaccacctcgacgtgttcagaagtatgtcttggaaacctgcaggacggcgaacttggtatgggttggtctgaacaaggttgctcatctagagcctgatgagatggagttcctgcttggtttccccaaagaccacaccaggggaatcggcaggcctgagaggttcaagtctttgggcaattcattccatgtcgacaccgtcgcataccatctctcagcacttcgggacatgtttccacatggcatgaatgtcctttccttgttctctggcattggaggagcagaggtagctctccacaggctcgacattcgcatgaagacagtcgtttcggtggagatatctgagacgaacaggttcgtcttgaggacttggtggaatcagacccaaacaggcactttgatagagatcaccgatgttcagagcctgactaccgagaggctcgagtcatgcatcaggaggattggtggttttgacctggtgattgggggcagcccctgtaacaatcttgctgggcgcaatcgattccaccgtgatggcttggagggagagcagtcgtcgctcttctaccactattacaggatcttggacacggtgaagtccatcatgggcagaatgtag

SEQ ID NO: 777 - DNA, 2363 bp, Sorghum bicolor
  source 1..2363: mol_type = genomic DNA
atgccagtggcgtaccaccagcgacctgcccattgctggtgctgtttggcgggcgcggcgcgtgagtttcttgttgagacttgcttggagattcgccgtctccccctctcgtctaaaagcgggcaaagcagagacggtggaggcaggcagagccgccctgtcgccggcgcggcctcctgctcctcctcctcctctgccaccgcctcccaactcccagcgcgcaggggccgacggcgacgggaggggagaagcggcagaggtagtccgaggaggggcggggccgacggcgacgggaggggagaagcggcagaggtagtccgagggggggcggagagaggctgcgccgtcccactccgtccggtgcctcagcccccggagccccttcgcgaaggttcgggaatggcgcactgggttagcgacggtgatggcagtgacagcttcgaatgggatagtgatggcaatggggaggaggcagggagcttcaacactgctggtgccagttcatcagcaatggcatcaacgaacactgacgctccaggcccatcgagacgggtaagccaggttgctaatggcaatgggaaggctgggccatctgcctctttggttcagaggtatatagacatgggtttcgcagaagagattgttgtgaaggccataaaggacaatggcgataatggagcagatgcattagttgagctgcttcttacttaccaggaactaggcaatgacctcaacgtggataacggctttgcttctggttgtgtcccccaaactgttgacgatagtggtgatgatgactttctagaaaactgggatgatttagatgctggtgggagaagcaccagagttgctaattctgttgatgattctggagacgaggatttcttacatgagatgtcacagaaggacaacaaaattgattccttagttaaaatggggtttcctgaagacgaggctgcactggctattactagatgcgggcaggatgcgtctatttctgttctggcggattctatctatgcttcacagaccgcaggagatggttattgtggcaatttgtctgactatgaggatggagggagaaacaaaggaaggttcatggatgggaacaacaaaaagagaaagagatatggaagtcaagcactgggaagtagaggcccattagatggtagcgctgatgaacccatgctgctcccaaatccaatggttggatttagcttgccagatcagtggccaagaccagtgaacagagatctacctgcactagctatgggtccaccatacttctactatgagaatgttgctcttgctccaaaaggtgtctggactatcatatcaagattcttgtatgatattcagccggagtttgtggactcgaagtacttctgtgctgctgccaggaaaagaggttatatacacaatttgccacttgagaacaggtcacctctcctccctaaacctccaaggacaataactgtagcatttcctcataccaaaaggtggtggccatcatgggacccaagacaacagttcaattgcctccagacttgtgtgtctagtgcaaaactgttagagaagattcgcgtaacccttacaaacagttcagatccacctcctccaagagttcagaagctggtgttggaggagtgtaggaaatggaatcttgcttgggttggcttaaacaaggttgctcctctagagcctgatgagatggagtttctactcggctttccgaaggatcacaccagaggtatctgcaggacagagaggtttcgatctctaggaaattcatttcaagttgatactgttgcttaccatctctcagtcctcaaggatatgtacccagaaggcatgaatgtactatctttattctctggtattggaggagcagaggtggctctccacaggcttggtatacgcatgaagacagttatttcagtagagaagtctgaggtcaataggacaattctgaggagttggtgggatcagacgcagaccggtactttgattgagatcaatgatgtgcagacactgacatctgagaggattgaggcatatattagaagatttggcggctttgatcttgtgattggtggaagtccctgtaacaatcttgctgggagcaaccgtcaccacagaaatggtttggagggcgaacattcttcattgttctttcagtatgttaggatcttagagtccgtcaagtccatccagcgtttatagtctttaggatcttcattgttttggttctggaattgtagcatctttcgttgtgatcaaacttgtgaataatttgaacgtcgactggtgtaattctcatgtcactctaatttaggctacttttaattttatcccctttggtg

SEQ ID NO: 778 - DNA, 2062 bp, Sorghum bicolor
  source 1..2062: mol_type = genomic DNA
gccggggccgtggaaaacgagagggatcgagggaggggtatccgtcggagcccctttgccaaggttccggaatggcgcactgtgttggcgacagtgatggtagtgacaacttcgaatgggatagtgacggcgatggggaggaggcagcgagcttcaacgctgctggtgccagttcatcagcaatggcatcaacgaacgctgatgctccaggcccatctacacgggttgctaatggcaatgggaaggctgggccatctgcctctttggttcataagtatatggacatgggtttcccagaagagattgttctgaaggccatgaaggacaatggggataatggagcagattcattagttgagcttcttcttacttaccaggaactaggcaatgacctcaaagtggataatggctttgcttctggttgtgtcccccaaaatgttgacgatagtgatgatgatgacattctagaaaactgggatgatgaggatgctggtggtagaagcaccggggttgctaactcggttgatgattctggagatgaggatttcttacatgagatgtcacagacggacgagaaagtttattccttagttaaaatggggtttcctgaagacgaggctgcactggctgttactagatgcgggcaggatgcatctatttcggttctggtggattcaatatatgcttcacagactgcaggagatgtttactgtggcaatttgtctgactatgaggataattcctacggagggagaaacaaaggaaggttcatggatgcgaacaaaaaaaggagaaagagatatgaaggtcaagcacacggaagtagaggcccattggatggtagctctgatgaacccatgcctctcccacatccaatggttggatttagtttgccacaccagtgcacaaggccagtggacagatcactgccttcacaagctatgggtccaccatacttctactatgagaacgttgctcttgctccaaaaggtgtttggactaccatatcaagattcttgtatgatattcagccagagtttgtggactcgaagtacttctgtgctgctgccaggaaaagaggttatatacacaatctgccacttgagaacaggtcacctctcctccccatacctccaaagaaaatatcagaagcatttcctcataccaagaggtggtggccatcatgggacccaagacgacagttcaattgcctccagacttgtgtgtctagtgcaaaactgttagagaggattcgtgtagctcttacaaacagttcagatccacctcctccaagagttcagaagtttgtgttggaggagtgtaggaaatggaatctcgcttgggttggcttaaacaaggttgctcctctagagcctgatgagatggagtttctactcggttttccgaaggatcacaccagaggtatcagcaggagagagaggtaccgatctctaggaaattcatttcaagttgatactgttgcttaccatctctcggtcctcaaggatatgtacccacaaggcatgaatgtactgtctttattctctggtattggaggagcagaggtggctctccacaggcttggtatacgcatgaaaacagttatttcagtagagaagtctgaggtcaataggacgattctgaagagttggtgggatcagacgcagactggtcttttaattgagatttgtgatgtgcagacattgacatctgagaggatcgaggcatatgttagaagaattggtggctttgatcttgtgattggtggaagtccctgtaacaatcttactgggagcaaccgttaccacagagatggtttggagggcgagcattcttcgttattctaccactatgttaggatcttagactctgtcaagtccatcatggagcgtttgtagtttttagaatctttattattttggttctagaattgtagcatcttttcttgtgatcaaactggtgaatgatccgaaggttgactggtgtagttctcatgccactctaatttaggctacttttaatttaatctcgtttggtgatcaatgcaaattgatgttggtgc

SEQ ID NO: 779 - DNA, 4761 bp, Sorghum bicolor
  source 1..4761: mol_type = genomic DNA
atggcggccgacccgccgcccccacctcctccggcgcagctcccgcctcctcgccgcccgcacaagcagcttcagccgcgggggtaccaggtggaggtgttcgccgcggcgctgcgcgggaacaccatcgcggtgctagacacaggctccgggaagaccatggtcgccatcatgctcgcgcgggagcacgtcctccgtgcgcgcgctggggagacgccacgccggatcgtggtgttcctcgcgcccactgtacatctcgtccaccagcaattcgaggtgattcgggagtacacagacctcgacgcggtggagtgccatggggcatcgggggttggcgactggaacgccaagcgctggaaggaagcaattggcagtaaggagattgttgttatgacaccacagatattattggacgctctcaggcatgcttttctaacaatgtgtgtgatgagcttgctaatatttgatgaatgccatcgtgcttgtgggaaccatccatactcaagaataatgaaggagttttacattgattctgagtggaggccagctatatttggaatgacggcatctccagtttctaaaaggggggcttctactatagaagattgtgaagcacagattgctcaacttgagctagtattgaatgccaaggtatatattgttgaagataggaatgaacttgagagcttttcaactggtgcgaaaattgtgaataaatactatgatccttacttatttgatttggatgatctggaatcaaagttacagatgctgttcgaggaggtggtgaaaatatataatgaaagcattaataccgtaggtgattctgaagattgtctattttctaaagcaagcctcaacttacaggtgtcctatttcaaagaagctttatttttgattgaagaatttttgccacagggttatggggagctgatgaaatcagaatctggttctgcggaactaactaagaggggatatgtttcttctaaagtgcagacactgatcaacattttcaaatcatttggctcgtcagaggaagtgctttgcatgatttttgtagaaagaattatgacagccaaagctgttgaaaggtttatgagaggaaatgtgaacttctctcgtttttcaatttcatacttgactggagggagtacatcaaaagattctttgagcccagcagtacagagatttactttggatttgttccgagctgggaaggtgaatttgctttttacaacagatgtcactgaagagggtattgatgtacctaactgttcctgtgtgatacgctttgacttacccagaactgtttgtagctatgtccagtctcgtgggcgtgccagaagaagcagttcaagttatgttcttatgattgaaaggggtaacttggtgcagcaggaacacatatttcgtataatacgaactgaatactatgttaaaaccttcgcactgcataaacagccaaatactccatcacttgatttgcctctccaagagaagtacatgtaccatgttgaatcaacaggagcaactatcactgcagaatgctgtgtcaatctaatttataaatattgtgagaagcttcctaaagataggtattacttgccaaagccttgctttgaggtgggtctcaaagatgggtcatatcaatgtgccttgacaatgccccccaatgctgcatttcgaagtatagttggtcctccaagcagtacatgtaatttagccaagcagcttgtatgcctcgaggcatgcaagaaactgcacgagctgggagaactcgatgatcatctagtacccttgactgaagagcctatggatatcgatacagacacaacagataaaaaatgtgtttctggaccaggaacaactaaacgaaaggagcttcatggaataataaatgttcatggtctatctggaaactggatccatgaaagtgaaactgtcattctgaattcttacacatttgattttcgttgtgatcaagaaggtgaaacttttgctgggttcgttctcttaatggaatcagtacttgatgatgacgtggcacattcagaaatagatctcttccttatacctaataaaatggtgtacaccgccataactccttgtggaaaaattcaactgaacaaagagcagctgcgtaaaggaaaattattccaagaattcttcttcaatggtatatttggtagattatttcatggttcccgaacgagtggactgcaaagggaatttattttcagaaaaggtcatgaaatacaatggggctcagacaacatgtacttacttttgcctttgaggaactcttcacatatacagcatgatctgaacatatactgggaagccgttgagtcttgctctggtgcagtggagcagttgagaaatttgtatctagaagatggaaatcttaaccatgaaaacttatgttcacataaaagaagcaacaagggagaagacatcattcatctggccaataaatctcttcatttttccacagtcaaagattcagttgtgctgtctcttcatactgggaggatctattctgtccttgacttgattttagatacaactgcagacgactcattcgatgagatgtataatgggaaagcttcaccattttcttcattcgtggactattaccatcaaaagtatggtattgttattcaacatccagggcaacctttgttgctgttaaagcaaagtcacaatgcacacaatttacttttttcaaaaatgaaataccaagatggttcaactggcaatcctctgctcgtggaaaaagagcaaattcatgcccgagtcccacctgaactactcatccacattgatgtcacaactgatattctcaaatcattttacttgctcccttctgtaatgcatcgggttcagtctttaatgttagccagccagcttcgcagagacattagttacactcaacgcataccaagttctctgattttggaagctataacaactttaaggtgctgcgagaccttttctctggagcggttggagttattaggagactcagtactgaaatatgtaataggatgtgacctgttcctaagatatccaatgaaacatgaaggccatctctctgatatgagatccaaggcggtatgcaatgcgacactgcataaacatggaatatgccgatccctgcagggttatatacgtgatactgcattcgaccctcgtcgttgggttgctcctggacagatatcattgcgcccttttccttgtaactgtggaatcgaaactgcatttgttccttttactggagaatatatcagtgatgatccatcttttattgtgggaaaaccatgtgacagaggccacagatggatgtgctcaaaaacagtatctgattgtgttgaagcactagttggagcatattatgttggtggtggcatcactgctgcaatttgggttatgaggtggtttggtattgatgtcagatgtgatatggaactagtgcagaaagcaaaatataattctaatgcatctcaattgtgctatttatcaaaattaaaagtttttgaggaactggaagcaaaactgaagtacaacttctcggtgaaaggccttctgcttgaagccgtatcacatccatctctacaggaattaggagttgactattgttaccagcggctggaatttcttggtgattctgtgctggatctattaatcacacaacatctctatgctacccacactgatgttgatcctggagaattaacagacttgcgttcagctttggttagtaatgagaattttgcacaagcagttgtaagaaacaatattcatagtcatctacagcatggatctggaatacttttggagcaagtaacagaatatgtcaggtccagtttggagtaccatggtaaagagaatgaattcgttcaacaagctacatttaaagcacctaaggttcttggagacatcatggaaagtattactggtgcaatatttatagatgtaaattttaacgttgatctggtttggaagattgttgaaccgttactttctccaatgattacccctgataagcttgcattgccaccttatcgggagttgctggagttatgtagtcaccttggttgcttcataaagtcaaaatgtactagtaaaggagaagaattaattatagagatgacggtgcagctgcgagatgaactgctgatagcacaaggacatgacagaaataggaaaagtgcaaaggcaaaggcagcagcccgaattttggtcgacctgaagaaacggggtctttctcttaaacaatgtttctctaaggctaagcaattggatattgtctcttcagaactgcaatcagaattgataagtttggaatcacgatatgattgtcctgacgtgaatggcagtcttagcctagaaggtctttcctcggtgagagcagcagttgttcttcctctcaaaatggataaaggtggacctcggactgcactttttaggctatgcaagagattgcagtggccaattccagaatttgaatttgtggaacaaaggttcaggactcctattgttctggatggggttacaaccacaaacttcaatagcttcgtttcaactattaccttgcacatacctgatgtgactgtcattacacttcaaggtgagcgccggactgacaagaagagttctcaggattcagcgtctctggtaatgcttcagaaacttgaagaactcaaggtctgcatatgcaagcagacacagcaaagcaacatggataataataccagttaa

SEQ ID NO: 780 - DNA, 4953 bp, Sorghum bicolor
  source 1..4953: mol_type = genomic DNA
atgaatcttttgaagaggccatccaactcatcgcctccagaagacgaaacagacaagcataaacggcagaagagggaatgccaggatttcacccccagaaggtaccagcttgatgtctatgaggttgctatgaggcagaacacaattgcgatgcttgacacgggagctgggaagacaatgattgctgtcatgctcatcaagcattttgggaagatcagcaaagcaaataatgatcgaaagctcatcatattccttgcaccaacagttcaactcgtcacacagcaatgcgaggttattaagagctacactgattttgaggtggagcattatcatggtgcaaagggtgttgatcaatggaaggctcatagctggcaacaacaattcttaaaatatcaggttatggtcatgacaccacaggtgttgctagatgctttacgccaagctttcttgatcctggacatggttagtctcatgatatttgatgaatgccatcacgcaactggtaaccacccatatactaggataatgaaggagttctatcacggatcagagcataaaccaaatgtgttcggtatgacagcctctcctatcataagaaaaggggtctcatctgatttggattgcgaaaatcagctatctgagctggaaaatattttagattccaagatacacgctgtggtggatagagaagagatagaactttgtgttccttccgcaaaagaagtgaacagatactatgagccgagaactgtttcttttgaagatttaagtgaagaactggaaattttgtgttccaagtatgatgggctgatcgtacaattgcataacagatcgaccaatcagtacaaagatgctgatgaaataacaaaagaatcacggagacgtctctcaaaatctttagcaaagatttgctattgccttgaagatgccggtcttctttgtgctagtgaggccactaaaatctgcattgaaagagggcagagaaaaggttggctgaaggggggcagtgacaccactgatcagcaaagtgatccaaatggaccaatcctatttgcagaaatttcaatgcttcatatgaagttctttcaggaagtgttggatataattgacaaacgcctccaacaaggaattgatgcccttctgaactcagagagtggatgtgtggaagcagcaaagatgggctatatttcaccaaagctctatgagctcatgcgagtatttctttctttcagtgactctgataacgtccgatgccttatttttgtggaccgaaagattagtgctagagtcattgagcggacaatgaagaaaataggccgactctcctgtttcagagtctcttttctaactggagggagttcttcagtggatgcactcacccctaaaatgcaaaaggatacgctggattcattccgctctggaaaggtcaacttactgtttactacagatgttgcagaagagggtatacatattccagactgctcgtgtgtaataagatttgatttgccaaggactacccgcagctatgtgcaatcacgtggacgagcacgacagcgggactctcagtacatactaatgattgaaaaggggaatgtgaaacaaagtgatttaatatctaggattatgagaagtaagacctcgatgactgagattgcttcaaaccgagagcctgaggattcacaccgcaatttcttccccattgaagaaataaatgaataccatataagcacaacaggagccaaaataactactgattctagcatcagtgttctcaaccagtactgtgacaagctcccgaaggacaagtactacaccccaagacccacgtttcagttcacccattatggtgatggttatgagtgtactgtaacactaccatccagtgccatgtttcaacttttggtaggtccaaaagcaagaaatatgcagaaagcaaagcagcttgtttgccttgatgcatgtaagaggctgcatcagctcggagcacttgatgaccatctttctccatcagttgaagagacgcctctggaaatttcaagcaagtctagtatctcaacatctggtacaaccaaacggaaagagctacatggtacaaccaaagttctttctatgtctggctcttggggttcagataaaagtgtgactaaacttcaaggctacaagttaaattttgtttgtgatcaagttgatcaaaaatactgtgactttgtccttctaattgatacaagtatagcaaaagaagctgctactttaaatattgatttatatttgcatgacaagatggtaaaagcttcggtttctccttgtggacctcttgagttggatgctcgacagatggaaaaaacaaaattgtttcaagcacttctatttaacggtttgtttggaaaactgtttattggatcaaaagcatcaaaaaccccaagggagttcattctcaagaaagatgatgcatttctttggaataaagaaaatatgtatttgctattacctgtggattctactcaggattctcataaaagtgtttgcatcaactggagtatagttgatatagcggctacaactgttggactcatgagaagcatttattcagatggcaaacataacctaaaggataaacttaatcatgaaaaaaatgacgaaaattttattcgtttggccaacaagtcatgcaaagctgatgatcttaaaaatatggtggttttagcaattcatactggaaagatatatactgttcttaaggtatctgatttatgtgctaatagtaaatttgatggtacatctgacaagaaagaagcaaaattccagacatttgcagaatattttgagaagaagtataatatatttctttgtcatcctttacaaccattgctagtgttgaaacccacccataatcctcacaatcttctttcctcaaagaatagagatgaaggtataattttgttttttgtaggcaatgttgtggaaaataaaaatagggcaaatagccttgttcacatgcctccagagttgctgattccccttgatttacctgttgatgttttgagagtattctatttgtttccatctctgatgcatcgtcttgaatcactaatgctagccagccaactaagaagtgaaattgcatacacagattctgatatatcgagcttcgtgattttggaagctattacaacacttagatgctgcgaggacttctcaatggagcgtttagagttattgggggactctgttcttaagtatgcagtgagtgcccatcttttcatgacatttcttaataagcatgaggggcagttatcgtccagaaggcaagaaactatatgtaatgccacactttatagacttggtactgaacgcagaatacagggttatatacgtgatgctgcatttgatcctcgtcgatggcttgctcctggacagctgtccagccgtccctgtccttgtgaatgcccagtaaaatctgaggttataactgaggatattcacagaattgatgacaaatctataattataggcaaggcgtgtgacaagggacacagatggatatgttctaaaaccatctctgattgtgttgaggctataattggggcctattatgtggaagggggattaaaagcagcttttgctgttctcaaatggttgcagattgagacacttgaggaagagcaaattatggaagccctatcaagtgcttcagtgcgaaattatcttccaaaagttgatgtagttgaatttcttgaagcaaaactaggctacacctttcaagtgaaaggtttgctaatagaggctctcacccacccatcacagcaagaatctggagcaacatactgctaccagcgcttggaattccttggtgatgcagtcttagatattttaataactcgccatttattccttagtcataaagacacagatgagggggagctgacagatttacggtctgcatcagtaaataatgagaattttgcacaagttgcggtaaagcacaatctccatcagtttctacaacattcttctgggttcctacaagaccaaattactgaatatgtgaatagtctggaaggttcatccatggacagaaccagccttttatccagtgggccatctagggggccaaaagttctaggtgatattgtagaaagtattgcaggtgctattcttattgacagcaaacttgatctggatttagtctggcgggttttcaaacctcttctttccccaattgtcacacctgagaatttggagttacccccattcagagaacttaatgagtggtgtgacaagaatgggtactttattggaattaaatgtgaaaatcgaggagacaaaacaacggctattcttagcttacaactcaaggacttgcttctggtgaggcaaggttgtgggaagaacaaaatagatgcaaaagcacatgcagcttccttattgctcagggatctagaggaaaaaggacttataattccaaagaatgcaagcagagtggaacaatttgaaaagaattctggtactagaaaccattgcaacaacttggttgatgttatggacacacaaaatgtagcaccacctaggcaaaaggaactaccggtgtcaagtaccgctcctggctctgttcttgataaaccattggttgtgaaggttaagttgagtaaaggaggacctcgtgtatcgttgtatgagtcgtgtaaaaagcttcagtggccaatgcctatgtttgaatttgtgaaagtcgagccaaaaaatatcagtgtgtgctcctcttccggtgattcttcacaaaaggttgcaccccaaggatatgcatttgcttcaacaataacattgcatataccgaacggcgatatcatcagcctcacaggagacggacgtgcggataagaagagctcacaggattctgctgcgctgctcatgctctatgagctgcagcggcgaggtagattccaagtccaagaagta

SEQ ID NO: 781 - DNA, 2742 bp, Sorghum bicolor
  source 1..2742: mol_type = genomic DNA
atggcaccgagctccccgtcccccgccgcgcccacgcgtgtctccggccggaagcgtgccgccaaggcagaggagatccaggaggaggaggttgtggtggcgtcctccgccaagcgcagccgcaaggcgccgtcttccggcaagaagcccaagccgacgcccaagcaggccaaaccggccaaggcggcgaggaagaagaagggggaggccgagaggaaggagcccgtggaggacgacgtgtgtgccgaggagcccgatgaggaggagctggccatgggcgaggaggaggcggaggcggcggccgatgagcaggccatgcaggaggaggtggccgcggtcgtggccgggtcgcccgggaagaagagggtggggagaaggagcgccgccgctggcggcgaccacgagccggagttcgtcggcaacgccgttcccgcggccgaggcgcgcagcaactggcctaagcgctacgagcgcagcactgccgcaaagaaaccggaggaggacgaagagctcaatgccaagtgccactaccggagcgccaaggtggacaacgtcgtctactgcctcggggatgacgtctatgtcaaggctggagaaaatgaggcagattacattggccgcattactgaattttttgaagggactgatcggtgtcactattttacttgccgttggttcttccgtgcagaggatacggttatcaattctttggtgtccattaatgttgatggccacaagcatgaccctagacgtgtttttctttctgaggaaaagaatgacaatgtgcttgattgcatcatctccaaggtcaagatagtccatgtggatccaaatatggatccaaaagccaaggctcagctgatagagcattgtgacctatactatgacatgtcgtactctgttgcatattctacatttgctaatatctcatcagaaaatgggcagtcaggtagtgaaaccgcttcgggtatttcttctgatgatgtggatctggaggcgccatctagtatgccagagaggacagcaacccttcttgatctgtattctggctgtgggggcatgtccactggtctttgcttgggtgcagctctttctggcttgaaacttgaaactcgatgggctgttgatcttaacagttttgcgtgccaaagtttgaagtacaatcatccccagactgaagtgcgaaatgagaaagccgatgagtttcttgctctcctcaaggaatgggcagtcctatgtgagaaatatgtccatcaagatgtggattcgaatttagcaggttcagaggatcaagaggatgaaggcagccctcttgacaaggacgaatttgttgtagagaagcttattggaatatgctatggtggtagtggaaggaaagatggcatctattttaaggtccagtgggaaggatatggtcctgaagaggatacatgggaaccgattgataacctgagtgactgcccgctgaaaattagagagtttgtacaagaagggcacagaagaagaattctcccgctgcctggtgatgttgatgtcatatgtggaggtccaccatgtcaaggtatcagtgggtttaatcggttcagaaaccgtgatgagccacttaaagatgagaaaaacaagcaaatggtgactttcatggatattgtggcttacttgaagcccaagtatgttctcatggaaaatgttgtagacatactcaaatttgctgatggctacctaggaaaatatgctttgagctgcctagttgctatgaagtaccaagcacgccttggaatgatggtggcaggctgctatggtctgccacagttcaggatgcgtgtgttcctctggggtgctctttcttccatggtgctccctaagtatcctctgcctacatatgatgttgtagtacgtggaaacaccccaaatgccttttcgcaatgtatggttgcatatgatgagaaacaaaaaccacacctgaagaaagctttgcttcttggtgatgcaatttcagatttaccaaaggttgaaaaccatcaacctaaagaggtaatggagtatggtggttcccccaagacggaattccagcgttacattcgacttagtcgtaaagacatgttggattggtcctttggtgaggaggctggtccagacaaaggcaagctcttggatcaccagcccttacggcttaataacgatgattatgagcgggttcaacaaattcctgtcaagaagggagccaacttccgtgacctaaagggtgtcaaggttggagcaaacaatattgttgagtgggatccagaaatcgagcgtgtgaaactttcatctgggaaaccactggttcctgactatgcgatgtcattcatcaagggtaaatcactcaagccatttggacgcctgtggtgggatgagacagttcctacagttgtaaccagagcagagcctcacaaccagattatattgcatccgactcaagcaagagtcctgactatccgggagaacgcaaggttgcagggcttccctgattactaccgattgtttggccccatcaaggagaagtatattcaagttggaaatgcagtagctgtccctgttgcccgggcactgggctactgtctggggcaagcctacctgggcgaatctgaggggagtcaccctctgtaccagctgcctccaagtttcaccgctttggggcgaactgcggtgcaggcgagggcctctcctgttggcactcctgtaggggaggttgttgagcagtaa

SEQ ID NO: 782 - DNA, 1464 bp, Sorghum bicolor
  source 1..1464: mol_type = genomic DNA
atggaatccagcggtaccaaggatggcctcaacaaggcgccaattcttcagagactcccaatgtcgaggcctcatgggtctggcacaaaagggaaccaaatacggcttcgtacaaaccacttcaaagtctcagttcacaggactgatgtcatcttctaccactacaatgtgagtgtgaagtatgaagatgataaaccagttgaatcgaaaggggtaagtagaacagtgatcgaaaagttgcaggaaatctatctggcaaatgtggactttgtttacgacggtgaaaacaacctatacacaatgtgtgcccttcagaatgtcgaggatgcgttcatggtagtagtggaggatggttcatctacaaagagtgctaggagtaggacccctggaggaaatggaagtccagaaggaagtgacacaaaaagaatgaagcggcccatgacttgtaagacgtacaaagtggaattgaaatcagtgggagaattttgtaaagaaaaaaaatcagtgggagaaatcccattgagtgccattgacaaagtcctgagaggtcaagaatctgatgattgtcaggaagcccttcgggttcttgacatcatacttaggcaaaagtcagcgaaacagggttgccttctagttaggcaatccttcttccatagcccttccgagcccattaagttgggtggtggtgttgtgcgatgtccaggatatcattccagctttcgacccactcaatctggactttcactcaacatcgatgtgtctacgactatgattgtggaacctgggcctgtcattaattttatactgtccaaccagtatatcaaggaccctagcagaattgactggggcaaagcaaagcatgcattgaggaatttgaggatcaaaaccactcacactaactctgaattcaagatttccagcctgagtgagaagtcttgctatgaacagaagttcctgttgaagcaaagaaacggcaatggacccgatgtcgtggaaataacggtctatgattactacttgaagcattgggatataagactgcaggattctgctatttttccctgcttggttgttgggaagcccaagcgtccgacatatctaccgatagagtccagaatctgtctacaattatcagctttgccatctagtgtcactgcaaaggcactgcaacgcattaactataattcggatgacatactgaagaagtgtggcatttcaatagctccagagtttgctcaagttgacggtagaatccttcaagcgccaaagctaaaagctggggatggtcaagatcttattgcacgtgatgggaggtggaacttcatgaacaggaagctctttgaggccaagggagtgcacacatgggctgcagttaattttacgacaaggtggaagcttcaggatcttgttcggaggctcattcactgtggtgacaacaagggcattgtaggtctatgtttctaa

SEQ ID NO: 783 - DNA, 1393 bp, Sorghum bicolor
  source 1..1393: mol_type = genomic DNA
atgggtattgtcactcaatgcattgctcccagtaataagatgaatgatcaatatttcaccaatgttcttctgaaaattaatgctaagcttggtggaatgaactctaaactggcattggaacatcgtcaaatgataccagttgtgactcaaataccaacattaattcttggcatggatgtttcgcatggttctccaggtcgagcagatataccatcaattgctgcggttgtgggatctagatgctggccattgatatcacggtatagagcatcagtgcgtacccagtctccaaaggtagagatgattgattctctatttaaaccactggatgatgggaaggatgatggcataatgagggaacttctactagacttctaccaaaccagccagcaaagaaagcctaagcagataatcatcttcagggatggtgttagcgagtctcagtttagccaagtactgaacgttgagcttaatcaaatcataaaggcatatcagagtatgggacagggggaccttccaaagttcacagtgatcattgctcaaaagaatcaccacacaaaactcttccaagctgattcaccagagaacgttccacctgggactgttgtagactccggcattgttcatccaagacagtatgatttctacatgtgcgctcatgctggaccaattggtacttcaaggccaacccattaccatgtgttgcttgatgagatcggcttctccgcagataatctccagaagctagttctttcactttcatatgtgtaccagaggagcaccactgctatttctgtggtggcacctatctgttatgcccacctcgcagcagctcagatgggccagttcatgaaattcgaagagtttgcagatacatcgtcagggagtgtcaattcatcatcgtcagcatcaataccagaactgccacggctgcatgctgatgtctgcagttccatgttcttctgttgaggtgattttagtttgaccgttgtggggtagggctacttctttctgaaggagaaccttatatgttggtacacagcaggttaactgttttgtgaagaaaccaagtaggttgttagttgtcgcaaatcatgtacgccagcatattttggagcagttttgggctcccccccaccccaccccaaaatgtaggtacagcttccagattttaggtagcctggacgtttgcatctgcaggtttttcgattggaatctagaagattttagggatattgagagagtagagccagacctttgaggtgaaggatacttggttaaatgatctttctgttaatccccaaaatgcgtgtgcattgggggggtataaaaatgagttaaaatttctgtatctcgcatggcatccaattgtactcgagtgtttgtgctgtac

SEQ ID NO: 784 - DNA, 3204 bp, Sorghum bicolor
  source 1..3204: mol_type = genomic DNA
atggcttaccgcggcggcggccgaggaggaggccgcggcggcgaccgcggggaccagcgcccgccgtacggccacggaggagccgggggatccggaggcggcggcggaggccggcccttcatctggccgccaccgccttccacgccgcgcccggtgatgccggcgccgccgccggggccatacccggtcccggtgccgatgggcggctaccgcgggcccatggtgatgccgcacccgggcgcgtacggggttccgatggccgtgtaccggccgtccgggcaagcggccgtgttcagggcgcccgcgccagcggcgccgcaggtctccttctcgcctgcgcctccggcagctccggtcaccatcagggcgccgccaccatcctcgaagacgacgtcgccggctgctccgtcgtctaccactccggcgcctccacgccagtccgcgcggcagagcgcctccacgccggcgtccgattcggctccggccgcctcctccgcgccgtctcccgcggcggccctggcgaaggaggtggagaagaagctgttcgtctccgagaccgcgctggcgccgcctgcgtcggcggcgcatgggacggctgctgcccgcgcggacgaggcgtcggacctcgacctggcgccggtctccaagaaggggctggcgcaccccgctcgcccgggcctcgccaccgtggggaagaaggtgatgatccgcgcgaaccacttcctcgtcaacgtcgccgacaacaacttgttccactatgatgaagtggactgcagatcagtgccgttccgtaaaaggctcttgccagaacatggaatcggaaaaaccattgggcagatgcgttggaaatcttgcatctgtttggtggctattaatcctgagtcaaagtcaagacaaaccaacagggaagttctgaatgagcttatcaagttgcatgggaagacagctctgggtggcaaactgcctgcctatgatggaaggaagagtctttatactgctggttcacttccttttgaatcagaggagtttgtggttacgctggttgatccagaaaagaaggacaaagaaagttatgtcacagtgtccagatcctttttctctactacttttggccaccgaggcgacattggcgaggggcttgagtgttggaggggttactaccaaagcctgcgcccgacacaaatggggctttcactgaatatagacatatcagcaacatccttttttaagcctgtgtcagttatcaaatttgtggaggagtacctgaacatgcgtgatacatctcggcctttgtcggacagagatcgtgtgaagataaagaaagcattacgtggagttcgcattgaaacaacccaccaacaggatcaaatcagaagatacaagataacaggggttacttccatccctatgagccagctgatatttcctgttgatgataaaggaacaagaaagactgttgtgcagtacttctgggacaaatacaactacagcttgaagcatggttcttggccttgtcttcaggctggcagtgattcacgacctgtatatttgcctatggaggtttgtaaaattctggaagggcagagatactctaagaagcttaatgacagacaagtgaccaacatacttagagcaacatgtaaacgtccccaggagagggagcagagcatacatgatatggttctgcataacaagtatgcagatgataggtttgctcaggagtttggcatcaaagttagcagtgatctagtgactgttccagcccgtgtgctgcctccacccctgttgaaatatcatgagtctggtagggagaaaacctgtgcgccaagtgttggacaatggaacatgatcaataagaaaatgatcaacggaggaactattgataactggacttgtttgaacttttcacgcatgcgacctgatgaggtacagaggttctgtatggatctgattcatatgtgcaatgcaactggaatggttgtcaatccacgtccatttgttgatgtcaagtctgcagctcccaaccatatagagaatgctttgagagatgtacacaggagagccacacaaatgcttgcccaacaaggagtgggaaatcagctgcagcttctgatcgtaattctgcctgatgttagtggttcttatggtaaaatcaaaagagtctgtgagactgacattggaattgtatctcagtgttgcttgccaaagcatgctagcagaccaaacaaacaatatttagaaaatgttgcactcaaaatcaatgtcaaggttggtgggcgcaacacagttcttgagcgagcctttgtacgcaatggcataccctttgtgtcagaagtcccaacaatcatctttggtgcagatgtcacacaccccccaccaggagaggactctgcctcatccattgctgctgtggtggcatcaatggactggccagaaatcaccaagtacagaggcttggtttctgctcaaccacaccgacaagagataatagaagatttgtttactgtcactaaggatctgcagaaggggcacagtgttaatggtggaatgatcagggagctactgattgctttccgcaggaagacaaacagaaggcctgagaggataatattctatcgggacggtgtaagtgaaggtcaattcagccatgtacttcttcatgaaatggatgccatcagaaaggcttgcgcttctttggaggagggatatctacctccagtcacatttgtggttgtccagaaaaggcatcacacaaggcttttccctgaggttcatggaaggcgtgatatgactgataaaagtggaaacattcttcccggaactgtggttgaccaacagatttgccatcctactgagtttgatttctacttgtgtagtcatgctggtattcagggaacaagtcggcccacccattaccatgtcctctatgatgagaatcattttactgctgatgcactgcagtcactgaccaacaatctatgctacacttatgctcgttgcacccgtgctgtatcagtggttccaccagcctactatgcccaccttgccgcattccgggcacgctactatgtggaaggagaaagctcagacggtggctcaacccctggcagcagcgggcagacagtagcccgggagggtcctgtggaggtgcgtcaacttccgaagatcaaggacaacgtgaaggacgttatgttctactgctga

SEQ ID NO: 785 - DNA, 3299 bp, Sorghum bicolor
  source 1..3299: mol_type = genomic DNA
atggcttcccgtgggcgcggtttcggcggagggcggcaaggccctggtggtgggcgcggcagcgagggcagggggcgcgggatcggtggcggcggaggttaccaacaaccctacggtcgcggcggtgatggaggcggtgaatccggaggccgaggcggcgtgggccgagggcgcggggtcggcggtcgcggcaacgggggaggccgcggacccggcggacgaggtggcgtcggctaccagcagccgccaccgccgccgctcgggaacgtagaggtcggaggccggggccgcggtggcgtggcggtagctgtaccagtaccagcccgccccgcggcgcctcgtcctcttgcgccggtcgtcgctgccccggcagttccagcagcggcctcgtcttctgcgccgccggcgcaagcgcctcgtgcccccgccggggcggctggaggcggagctgccttggcggcaggcatggggaggttggccgtggccgacaaccccgctcctcccgcgcctgctgcaggtagatccgaggcgcaaggtcctgcgcaccggcctccgcctccgcccctctcgagcaaggggatcactccgcctgcgcgccccgggttcggcacgttggggaggaagctcatcgttcgcgcaaaccacttcgctgtccaggttgccgacaacgacatctgccattatgacgttttaatcaatcctgaaccaaaggcaagaagaaccaacagggtgattctgtcagagcttctcaaggtgcatggtgcgacatccctcgcccataagatacctgcctatgatggaagcaagagcctatacaccgcaggcgagctgccattcaaatcaatggagtttgttgtcaagttggggcgccgagaaattgagtacaaggtgacaatccgatatgcggcacagccaaacctgtaccatcttcagcaattcctcaagggtcagcagagggacgccccatatgacacaattcaagcattggatgttgccctgagagagtctccttctctcaattatgtcactctttctcgatccttcttctccaagaagtttgataatggggtggacattggtggtgggctagagagctggagcggatattaccagagcttgcgcccaactcaaatgggcctctcattgaacattgatatatgctcgacttcattttaccaatctatccctgtggtaaaatttgttgatgattgtcttgggctgacaaaccctgcccaacctttttcggacagggatcgtttgaagcttaagaaagccctgcgtggagttcgtgttgagactacacaccagcaggggaaaaaaagcgcctacaagataactgggattactcctgttccattggctcagctgagcttttcttgtaacgaaggacctcagttgactgttgtccagtactttgctgaacggtacaactaccggttgcgctatactgcttggccctgccttcagtccggcaatgattctaagccgatatatttacctatggaggtgtgccaaatcattgaaggacagaggtaccctaggaagctcagcgacacacaggtgaccaatatactgaaggcaacctgtaaacgtcctcaggagagggaggggagcattattcagatggttcaccgcaacaactattcagctgataagatggcacaggtgtttgggatcactgtggccaaccagatggctaatgtgcaagctcgtgttctgcctgcacctatgctgaaatatcatgaatctggaagggagaaaacggttgcaccaagtttggggcaatggaatatgattaacaagaaaatggtcaatggtggaactgttcacagctggacttgtttgagcttttcgcggattcagcttcatatagtagacagaatatgcgaggacttggctcagatgtgcaattccattggcatggattttaatccaaggcccgtgacagaagttcagtcagcctcacccaaccacatagaagctgctttaagggatgtgcacatgagggctccaaatttgcagctgcttattgtcgttcttccagatgtttctggtcattatgggaaaattaagaggatatgcgagactgaccttggtatagtatctcagtgcatcaatccaaagaagaataaaaacaagcagtattttgaaaatgtcgcccttaaaatcaatgtgaaggtgggagggcgcaatacagtgcttgagagagcctttgtgcctaatggaataccttttgtctcagatgtgccaacaatcatttttggtgctgatgttacccatcctacagcaggagaagattcctcggcttctattgcagctgtggttgcatccatggactggccacaagtcacaacatataaagcactagtctcggcgcaagcacatagggaagagattatacaaaatctgttctggactggtacagatccagagaagggcactccagtgaacggtggaatgataagggagttgctgacttcattctttaagaggactggacgaaagcccaaaaggattatattttacagggatggtgtaagtgagggacaattcagccacgttttgctccatgaaatggacgcaatcaggaaggcctgtgcctctatggaagatggttatctaccaccagtgacattcgtggtggtacagaaaaggcaccacacaaggctcttccctgaagttcatggaaggagagatcttactgacaaaagcggaaacattcttcctggaactgtggttgatactagcatttgtcatcccagcgagtttgatttctacctctgtagccatgctggaattaagggaacaagcaggccaacacactatcatgtcctctatgatgagaaccgtttctcggctgatgctctgcagtttctcacaaacaacctttgctacacatacgcacgctgcacacgcgctgtttctgttgttccaccagcctactacgctcacctggcagcattccgcgcaaggtactatgacgaacaagagagcaccgatggaacctcagttgtcagtggtagcgccgccacagccggcggtggcccacctgcgttccgcaggctcccccagataaaggagaatgtgaaggaagtgatgttcttctgctgatgaaccggcgcgagctgctgtttgcttctattagtgtcgcatgcctttgctcctcagtatgcaagaggtgttgttagtttacaaacttagctgctgatgcaactttgagtatttgtggtgagttggtactgatggctgttctgactatattttgcatgagtgctgttaatgaattttagttgtggttt

SEQ ID NO: 786 - DNA, 2928 bp, Sorghum bicolor
  source 1..2928: mol_type = genomic DNA
atggcgccgccgccgccgccgccaccgccgcaggcgcaggcgcggcaccaccaccaccaccaccaggggccagccaacaagggcggcggccacgcggagcggacgaagcagccgctgcagagcagcgtgacgcagcccaaggcggagccaccggcggtggtggcggcggccgtgctgccggagggaggcaagcggtgcggaggaggaggaggagggaggcgccgcggcgggcgcggccgggccaaggcgccgccgggtgagtctcgtgctgcgctggcggtagcggtagcgccagcgccggcgcaggcgcctccgccgcgcacggtcattgggccgcccgtgccgagcaaggggctgtcgttctgccgccggccggggttcgggacggtgggtgcgcgctgcgtcgtcaaggctaaccacttcctcgccgagctcccggacaaggacctcacccagtatgatgtgaagatcacgccggaggtgagctcgcggaccgtgaaccgggccataatggcggagctggtccgcctctaccgcgcgtccgacctcggaatgcgactcccggcctacgacggccgcaagaatctctacaccgcgggcaccctcccgttcgactctcgcgagttcgtcgtgcgcctcaccgatgaggacgacggcaccggcgtgccgcctcgggagagggagtacagggtcgccatcaagttcgccgcgcgcgccgacctccaccacctcaggcagttcatcgccgggcggcaggcggacgcgccccaggaggccctacaggtactcgacatcgtgctccgcgagctcgccaaccagaggtacgtgtccatagggcggtccttctactcgccggacatcaggaggccgcagcggctaggcgacggcctgcagtcgtggtgtgggttctaccagagcatccggccgacacagatgggattgtcgcttaacatcgacatgtcgtccacggcgttcattgaacccctgccggtgatcgagttcgtggcccagatattaggaaaggatgtcatatcaaggccattatccgatgctaaccgaatcaagatcaagaaggcattgcgaggagtaaaagttgaggtcactcaccgggggaatgtaaggcgcaagtatcgcatttctgggttgacaacgcaaccaactcatgaactgattttcccaattgatgagcaaatgaatatgaaatctgtcgtggagtacttcaaggaaatgtatggtttcaccattcagcatcctcatcttccctgccttcaggttgggaaccaaaagaaggcgaactatctaccgatggaggcatgcaagatcgttgaaggccagagatacacgaagaggctgaatgaaaaacagatcacatcattgctgaaggttacatgccaaaggcctagagaacaggagatggatattctacagacagttcatcaaaatggatatgagcaagatccatatgcaaaggaatttgggatcaacattagtgagaagctaacctctgttgaagctcgagtccttcctgcaccttggttgaagtaccatgacactggaaaagagaaagagtgcttaccacaggttggtcaatggaacatggtaaacaagaaagtgataaatggatgcaaggtgagccattgggcgtgtataaacttctcaaggagtgttccagaaaacacagctaggggattttgccaggaattggcgcaaatgtgtcagatttcgggcatggaatttaacagtgagccagtgatgccattatattcagctagaccagaccaagtagtgaaggcacttaaaaatgtgtataatattgcattgaacaaactcaagggtaaagaacttgaacttcttttggctatcctccctgacaacaatggtccgttatatggtgacatcaaacgtatttgtgaaactgatttgggattgataacacaatgttgcttgaccaaacatgtttttaagatcagcaagcagtacttggcaaatgtctcactgaaaattaatgttaagatgggaggaagaaatactgtgctcctggatgcaataagttggaggattcctttggtcagtgacataccaactattatatttggtgcggatgtaacacatcctgaaactggggaggactcaagtccatcaattgctgccgttgttgcttctcaagattggccagaagttacaaagtatgctggattggtttgtgctcaggcacaccggcaagagctcattcaggacctttacaaaacatggcatgatcctcagagaggcactgtaacaggcggcatgatcagggagctcttaatatccttcaggaaggccactgggcagaagccattgagaataatattctacagggacggtgttagtgaaggccagttctaccaagttctcctttacgagttagatgccatccgtaaggcatgtgcgtccctagaaccaaattaccagcctcctgtaacatttgtggtagttcaaaaacgtcatcatacaagactttttgcaaataatcacaaagacagaagtagcatggacaagagtggaaatattttgccaggaaccgttgttgattctaagatatgccacccaacggagtttgatttctacctctgcagtcatgctggaattcagggaacaagtaggcctgctcactaccatgtcctctgggatgagaacaatttcacagcagacgaaatgcagacattgacaaacaacctttgctacacttatgcccggtgcacacgctcggtttctgttgtccctcctgcatactacgcacacctggcagcattccgggctcggttctacatggaaccagagatgtcagagaaccagacgtcaaagagctccaatagcacgaacggagtctcggtgaagcccctgcctgctgtgaaggagaaggtgaaaagggtgatgttctactgctga

SEQ ID NO: 787 - DNA, 4175 bp, Sorghum bicolor
  source 1..4175: mol_type = genomic DNA
ccgccggggaggtggtaatggcggaagaagatccgctgccgccctgcgacccgcagacgcaggcgagatggtaccagctcgaggcgctggagcgcgcgctggccgggaacacgctggtgttcctcgagacgggcgccgggaagacgctcatcgcggtgctcctcctccgccgcttcgcgaaccgcatccgctcgtccccgccgccctgcttcgccgtcttcctcgtccccaccgtcgtgctcgtgtcccagcaggcgcgcgtcgtccgggcgcacacggacctcaccgtcgccgagttcttcggcgagatgggcgtcgacttctggaacgcggacaagtggcgcgacatggtcgacggggccgaggtgctcgtcatgacgccgcagatcctcctcgacaacctccgccacagcttcttcaggctccgggacatcccgctcctcatcttcgacgagtgccaccacgccaccgggaattcgccctacgcctgcatttttaaggagttttatcatccccaactgaattctaggccatcagatcctattccaaggatatttgggatgacagcttccctaattaattcgaaagatcttgcgcgtgacaaatattcaatgaaaatatctgagctcgagaacctcatgaatgcgaaggtgtacactgttgccagcgaatcagagctattgcaatacattccatttgcgactacaaggataatcgagtatgatgattatatcgtaaagtctgagttatatagccatactatccgttgcttggacaaattggaagcgaagcatttagaaatcctgaagggcaaactgcatggttcatatttggaaaatgcagagaaaaggattaaaaaattaaatgcaatgttcttatattgcatatctgatcttggagtatggctggcagcaaaggctgctgagattctacaatcaaacaaggaaagctgcgtatccttttggggtgaaaaactggatgacgaagttgagggattcattagaaactatattggtgacgtaaataatgaactgtcagaaattatattgaagatgacaaagaggggtttacaacggcatattggtgaggactttgatgcggatttgcaagatgggttattgaaatccaaagtttattttcttatcaaatctcttttggagtataggcatgtgcaagatttgagatgcattgtttttgttaagagagttattacaagcattgtgttggaggctcttctgtcaactattaatcaaatgtctggatggagtgtaagatacatggcagggaaaaattttggtttgcaatatcagagtaggaatacgcatgtggaaattgttgattcatttcgaagtggaaaggtgcacctaattattgccacacaaattttggaggagggactggatgtgcccagttgtaacttgataatccgctttgatcaggcagcaactaatgtggatggtggttgtctttttgatggcgtccgtgacacgtctgttttctgtttcgacgggggggacgccaatgctctttctaagacagaggagtttctcgaaagtggacaaatcatgcgtgaagaatctcagagattggaatctactttttatcagcctcttccaaacaccctatgcaatgaagaattttatggtgttcaatctactggagcaattgttactctgaactctagtgttcagttgatttactttttctgctcaaagctaccttccgatgagtctgttttctttcttagattagacaatgttttcttttggttcatacaacaaaacatttcctggtattttaatcctctaccaagattcaatattgacaaggcattaggtacatgtacgctgcatcttccaatgagcagtcccgtacaaacaatttatgctgaaggagaaatttctatcatcaagagggttgtttgtcttaacgcctgtcgtgaattacatgctgttggtgctctcacagattatctcttacccgaatcgagtgttccatgcgaagatgaacctgacattgttgtggacaaatacaaggaggagcaacctgactactttccagaacaattaatggataattggttgtctttttgtcatcgtggcttatattattgctacaagatctcactggaaggttgttctgaaacaactactccagctgagatagtattagctgtaaagtgtgatttgggatctgacttcatttcaaccacattcaaattgtggggtgtgcaagactatttgagttttaccataagatatgttggtgtgattcatctaaatcaagaacaggtaattgtcgccagaagatttcagacaagaattctttctttgcttattagtaaggacctttccgaagacggcaattctattaagagtttacttgaaatgcaagtatcttctggagctgtgtatctacttctgcctgtagtttctggaaaaattgattggtgcagcatcaaattctcatcctcagaaatgcatgaagatactatcatggatagtagacacagccattcttgtaaagatactggtttgctgcagacaaaaggtggccctttctgcccatgcatgcttcaaaattctattgtctccaccccacataatggcatgctctatgctgtttctgggcttcttcttgacttgaatgctaattcgcctatgcgtgagagtgttcttagctacaaaacccattttaaagaaagtcatggccttgacttaaaatgtgaagatcaacctctcttgcgtgccagtaaacttgtgaaagtgcggaacatcctccatgagcgcaactataaaaaagaaaaagaaagtacaaatgtgtttgaattgccacccgagctctgcatagttgtcatggcgccagtgtcagcaaataccctgcgctgcttcacatttattccttctataatgtatcgtatccaatgtatgcttctttctgtgaatttgaaaacgcaattgggtccaagcatgaagcagttcgatattccagcactaaaggttctggaagcactaacagcaaagaaatgcaaagaagaattttcgcaggaatcattagaaacacttggagattctttcctcaaggcctgggctttcgctgctgttgtcaattgtggaatattattcctcctttggcgctcagaccaggcaaagggatacattcgaagcgaaactttcaaccctgaaacgtggattattccaggggttggcaatgactcatgtggtaggagtctgaggaagcttaaaagtaagaggatcgcagattcagttgaagccttaattggggcatatcttagtgctgctggtgagcaggcagcgtatcttttcttaaaatctttaggaatggatatagagtttcacaaaatgccagttgaaaggaaaattacaatcaatgcggagaacttcattaaccttagaagtttggagctaatgcttgactataatttcagtgatccatcattgttgttggaagcactgacacatggttcatatcagattgccggcactactgcatgttatcagcggctcgagtttcttggagatgctgtattagatcatatttttaccgattatttctaccatcagtaccctgaatgcactccagaactgttgacagatctgagatctgcttctgtgaacaatagctgctatgctcatgcagcagttaaagcaggattacataaacatattctacattcatcatctgcactgcacaaaaagatggctgactacctcgacaagtttgagcagtcattttcaggtccatcacatggttgggaagctggcatctgtttaccaaaggttctaggtgacgtaattgagtctatcgctggtgcaatctacattgataccaagaacgacaaaaaggttgtttggagaaagatgaaacggctactagaacctcttgccacccccgacactcttgaaattgatcctgtcaaagagctgcatgaattctgtgatcctaaaacgtgcagtatcaagtacacagtagctcgtgaggaccgggtaacctcggtggccgtagaagtacagaccaaagggactacatacaaggccactcggacaggcctcaccaagcgtgacgccaaaaagttagcagccaaatccgtgctcaaagatatgaaggccgcgaatagcacgcagcattttgcaaatggtatcagctgcacttaa

SEQ ID NO: 788 - DNA, 2297 bp, Sorghum bicolor
  source 1..2297: mol_type = genomic DNA
atggagcactttgtggagttacctccagaactatgctctttgaagataactgggttctcaaaagatatgggtagttctttgtccttgctaccatctttaatgtgtcgcttggagaatttgttggtggctattgagttgaagaatgtcatgtcatcctatttcccagaggcttctcaaattagtgcctcgggtatccttgaagcactgactactgaaaggtgtttagagaggatctctttggagagattagaagtcctaggtgatgctttcttgaagtatgtagttgggcgccataactttatttcatatgaaggacttgatgaaggtcagttgaccaggagacgttctgatatagtgagtaattcaaatttatacgagttgtcaattagaagaaatttgcaggtatacatacgggatcaacactttgaacctactcagttctttgcattgggaagaccttgtaaagttgtttgcaatcctgacagagaagcaactttacacccgaagaatatcgacccagatagacgtgaaaactgtaacttgaggtgtacaaaatcacatcattggttgcataggaagacaattgcagatgttgttgagtcacttcttggagcttttcttgtcgagtgtggattcaaagctgcatttgcattcctacgttggattgggataaaagttgatttcgaaaattcagctctctatagagtattagatgcaagctccaccaatttgtctctcatgaattacatgaacatttctgagcttgaagaattgattggctacaccttcaagcacaagggtcttcttctccaagcatttgtacacccttcattcaataagcattctggaggatgctaccagaggatggagtttcttggagacgctgttttggattatttgatggcctcgtacctctactcagcttaccctgatctcaagcctggtcaactaacagatctgaaatcattagctttgaataataattcatttgcttatgtggccgttaagaaatctatccataaatatctcataaaggattctaaatctcttacggcagcgataaataaatttcagaattatgttaatctttccagttcagagaaagacttgttagaagaaccaacttgtccaaaggttcttggtgatattgttgaatcttgtgttggtgcggtgcttttagattccggcttcaacctgaaccatgtttggaagctaatgctaatgcttctaaagccaatattgagcttctgtggcatgcacatcgatcctatgagagaactcagagaaatttgtcaatataatggttttgagttaggacttcccaaacctacggaggacaatggagagttccatgtcaaagtagaagttaacatagatggcaagatgataagctgtactgcagcaaaccggaattcgaaagatgctagaaaggtggctgcacaagaagcacttttgaaactgaagaataatggatacaagcataaaagaaagtcactggaggaaattttgcgtgctaccacgaaaaaagaatcagagctgataggctatgatgaagaaccaatcaatgttgaggatgacatacaaatgaagaatctattgataaatggagaaatggaaggaaacatcttttttcaaaataaagaagtgtctttgaacgggaggtctgaaacctccattcagagtacaacaggagataacaaggttgacaagaatgatgctaataatggaaggaacaataagtccaatgtggtcgtgcagaatggttgtctacctagaggggcaactgataaaacaaaccaaagagagtatcatggtgacatggtacgcaaaacagcaaggtcattcctttatgaactatgtgctgcaaactattggaaacctcctgattttgagttatgcaaaggtgaaggaccaagccaccttcgaaagttcacttgtaaggtccttattcagatcacgggaacttcagcgacccttttggagtgctatagcgatcctaagctacaaaagaaagcagcgcatgagcatgcagcagagggagctctgtggtatcttaagcaacttggatacctaccaaaagatgattatcgtgtctagcgacattttaggtttgtggccttcagtgggaagagttttgttattgtaaataggcctcagatggaagagttttgttattgtaaataggcctcagatggaagagtttttttattgtaaacatgcattttgttcagagatatattgacacatacgaagctcacataggataagaaactagcaaatacttcctctatctcaaa

SEQ ID NO: 789 - DNA, 9246 bp, Sorghum bicolor
  source 1..9246: mol_type = genomic DNA
ccataatttttagttgtagagatttagtgtttcatacatatgctgtaagatttatgcaatggagaatctaaggccttgtttacttcccagaaaattttacaaaatttttcacattccccgtcacatcgaatctttagacgtatgcatggagtattaaatatagacgaaaataaaaactaattgcatagtttggtcgaaattgacgagacgaatcttttgagcctagttagtccatgattggacaatatttatcaaatacaaacgaaaatgctacaccaaaatttttcagaactaaacaagcctaaataagacctgagtcactgacggagaaggaaatgcggcaaccatccttttccaaggctgcccaagcaaaccgcgaaaacggaagcgacacaccgcccggcccggccgcagggaggacgctctctgctagcctgcgcgacgcttgcgttgccgctgccaccgccgccgcgctgttgaatgctccgggtccacggtgcaccaggcggaaggcgagacgccaagcacggtgcggggcctacttgtgtgtgggacgaagcccgtagacccggtgcagctggagggttggagccaggagcgcagcagcctttggacgccgacgcggggataccgccgaggaggtcctaacggtccgatgacggcgccgtaagctaacggcttcttcggcttcgatccgcctgctgcatgtccaggtgtcctccccgcacggccgtcggatcgccgcgaccgcagctcctccgtcacgctaacgccggtaccagaccggatgggacgcactgtgggctcgactgctcgggcggcggtctgcagtgacacttccggggagcgacaccttatatctcactgattggtgggaccagatatcacgcggacccacgtgtcattgatggggtgggattgcgccaggtcgccaccggggtgcgtatggagggcacacacacagtcaggtctcaggatatggttcgccgcggagggccggaggcagcagcgttccctcgacccggcagaactcaccaaagacaatgactagtggggtacaattttacggggcccgcaagtcagtggagtagttgttgcgtccgatgccgctttggcgtgcaccgaggaagtggagagcacggtgggcgttagtgcgtgaggtgcctaccgctaccgcgtccagtcctcccctccacgtgtcacctcgtctgggccccaaagttccgggctctcccaacgcacggtcaagatgggccgatcggagggccccgctagcagagcgcaccgcgcgggcgggcgggcgggtgcggaatgacctcgctgcccttctcgtccccgtcgtacaggagggcagctggtacaagaggggggtgggtgcgggcagaggagccggtgttctgtttggaaagccggagggggtgagaagttttctcgccttctcggagacgtcgccatccaccccccgcttccaccactctcggcggtaaccgaaaaccctcccctcctgttcctctctcacactcccccgcttccttccctgttcgtggaaatctagggttttggaagggtttagatcgcctgctctttgccgcggcggttgttcgtgcgccgcggatttagggagggtttctgcggtgaggggttttgcgccccctggcggtgtgttcttcgtttcttcggggggttttttaccctctttggtgtcaggatcgctgcattccggtctgcgcttagagaggtgttgtctttgtggatggattctgtttgtctaggtttttggtggattttcgtgcggttttaggatttttgttgttgttctccatcgagcaggtcgagttttttttcaagggtcattgatggtgtccttgtggcgcgcatgtgacagcgtttgggggttttgttttgtggattgattcttttttattatgccttaccgattttcatctttttttttcacatggagggttttcttgttttcgtgtttgcaatggcgaaggtgtgatttttgctcttttttcgtcgcgcatttgttcttgtcatgtttaaggcttatttttctcctcttttttgagcctttctacgtacaaaatggaggagcttattccggttttcttctttgttatctttaaaggagattatttttatttatttttgcgcgttttctgtagctggtcttatggttctccagttccatcacattgaagaagatctgcgccttgtttagaaacaaaaatcttttcaagattccccgtcacatcaaatcatggagcacatgcatgaagcattagatatagacgaaaataaaaactaattacacagtttgcccgtaaatcacgaaatcttttgagcctagttagtccatgattggataatatttgtcaaatagaaacgaaaatgctacagtgccgaaatccgacattttttcggaactaaacaaggccctgatttttatgtgtttttggggaggtttatggtggcactgttcatttctctggataaagattttaatcgaaaactcatttggtgtttgaaaggttcgttcttaataatatcagtgcgttgttctgaagggttcattcataaaggttttagtgcggcgtcgttgttaatttgggggtacgtgctgcaatttcctttgcctttttttttggtttcttggagtcctggaaatttcgccatgacattccaaaggaattttttttcttgcctttcttcccggatgtgttcccctttccaaatcttttgcatattttggtttctatatagatatatgattacataactcttattgtaatttgtttacattctcctttgtttattgttgttttattgttatacgatatgatatgcggatatgatacaattcgttttcatttgttgatgtgcagggtcgggcagaggctttgcagctttgggtcagatacagtgctctcgtgagtatattaagccacatggtttacaatttttgtttgagcatgtagaacggctcctataaaggacagtaggatgtttcggcactagttctgtcactagcaaatcttctgtggactgtggtagtgttttgaggtccttgtttagtactgtttccatagtttgttgtttattaacatttccatagtttgtgagatgatcacaatttcattttttgtgtttttaaatttgttaaatcacagcaattgtgctttgcctacctgtaccattcttgcatctatactatgcagtcactttttctcttactgctaaattgtataaagtatgaggaaataaaacaaatgctagatatttaactgttccagtttccaattgatataagtggaatatcttctattgctattagagtagtctgggctgcaaaataataaagtatcctgatgttacatttgtgttgtgtatttggtggacttgagagtaaacattgtggtttactgaaatgtatactgttaagagaatgtgtattgttgggggtgtggtataagttagggaccccccattagtgtgtaataaggcccaattactaatcataggggcctatttgtgagtgtttaggaaccagttgcagtttgtaggatttcatcatttcttatagttcatgtttctattctgctgcccttgaaaatctttagcaaagtaaatggcaacttgaattcctagtttttgttgcttaagcttgttgtactatgccgaaatcagatgtttaatctctgtttgaagtgtgatttacctgtatacttgtccttctgccacttcagttgcattgctgcttgcttgaatcatacagccagttcctatgtatatgtcttattggggttcctttggatatcactcatgcagcaaggcccactaaatggagtctcacaatggcgaggctgatgacttgcctccaccacctcctttgaatgctggtgttgaaccacttaaagctgatgaaacaaaggtgccattgaaacataggactctggtccagaggaatggctttggcagaaaggggcagcagataaaactgctaacaaatcacttcaaagtttctctcatgaatgctgcagattatttctatcattactacgtacgtctcttatccttgtctagtgtcatctctttattttcatcctcataccttcattattgatgctgttatcttttattggctgcaggtcaacttgaagtatgaagatgatacaccggttgatcgcaaagggtcgggaagaaaagttatagaaaaactgcagcagacttatgctgctgaacttgcaaataaagattttgcatatgatggtgagaagagcctgttcacaatcggtgctcttcctcaagttaaaaatgagttcactgttgttgttgatgatgtttcaactggaaagtaagcctcagttattttgatcgatttgtcattatctactctgataattatccctaaagattaacttgactatcttgctttcaggactcctgcaaatggcagtccaggaaatgacagtcctcctggaagtgacaggaaaaggatcagaaggccttacaatacaaagacgtacaaggtcgaactctcttttgcggcaagaattcctatgagtgcaatctcacaggccctcagaggtcaggaatcagagcacacgcaggaagcaattcgagtgattgacattattctgaggcagcactcagctaagcagtatgtaactgtttcatgcaattcagtattacaaatattgctgatattattgatggttcttgcagtgtagccattctgtcttttaactgtgtccctttttgcttgcaggggttgcctattagtaaggcaatcattcttccacaataatccttctaactttgttgacctgggtggtggtgtagtgggctgtagagggtttcattctagttttcgtgcaacccagagtggactttcactcaacatcggtctgttcttgtacccattttccctgttttaatctatacaatacaatgatcatttctctctatgcagttaggtggtaatgtttgcatgtgttaatatgttgtgcagatgtgtccaccacaatgatagtgaaacctggtcctgtcattgattttctgcttgccaatcagaaagttaatcatccaggcatgattgattgggctaaggtaaggcttcatgcttaatacaacaaataggaggttgagttccattgttccatttcaccatactttggatttatatttttgcaatttgttatacttatgtaggccaagcgttcactgaagaacttgaggatcaaaacaagtccagcaaaccaagaacagaagattgttggtctcagcgacagaccttgctgtgagcaattgtaagtagagtgatgtgttgttgtttgaaatgtttttatattgtttgcactttattttgttctccaacctcatcctgagttctgcatcttagttatttacatcttctaagtacttggtgatttacttgcgtatgtagattcacactgaaacataagaatggtaatggagactctgaagagatcactgtttatgattacttcgtaaagaaccgtggcatagagctgcaatactctggtgatcttccatgtatcaatgtgggaaaaccaaagcggccaacatattttccagttgaggtaactattatttgaatcctagtgtttttcctttgctgtaaagctctttccctctaatgttgtgaagattgtttctgtgtttaccagttatgcagtcttttgcctttacaaaggtacactaaagctttgagcacacttcagaggtcatcacttgttgagaaatctaggcagaaaccacaagaaaggataggtgttttgtctgatgtgagtgtttttgtcaattaaacctagcaaattttccttttgttattatatataccaataacaattggcctagcaagttgggttatagccttatggtgtggttttcttgaaacttcaaattttttttcatgtcaaattgggtaggtactgcaaagaagcaactatgatgcagagcccatgctgaaggcctgcgggattacaattgctagaagttttaccgaagttgatggtaggatactgcagccccccaaggttggtcattactgtttatcctttatcatttcagatgttctttgtggttatgaaattttgaaggcataaattttttctgtcctatggttcagcttaaagctggcaatggagaagacatttttacacgcaatggtagatggaacttcaacaataaggtaagaatgtatagtatattctttcttttgtgtatgtggattttcgtgatgccacatgtaatatttggaattctgtttttcagaggctcattaagggtagcagtgttgagaaatgggcagtggtcaacttttctgcacgatgcaatgtcagggatcttgtccgtgatctcatcaagtgtggaggcatgaaggggattgtaagtttattttctcattatgttgtgcatttccagatgtgctctaattcatgtttgggatttcatttccacatgttcttatttacttgtttcgtgttgcagatggttgaagctccttttgatgtatttgaggagaatccttcgatgagacggtcgcctgctgtaagaagggttgaagacatgtttgaacaagtcaaaaccaagcttcctggagctccgaagtttcttttgtgtgttctagctgaaagaaagaattctgatatttatggttggttactactaaatcgctgttaacttctgtggcacattttgtttgttctgtatcactatgccattgacctttacagggccttggaagaagaaatgccttgctgaatttgggatcgttacacagtgcgtggcaccaactagagtcaatgatcagtatcttacaaatgtcctactaaagataaatgcaaaggtctgtttctctttaccatgagatttgagagcatggcaacatttgtacattgcaattacatatttttggtatttcgtcccttttcaaacagctgggtggcatgaattcgttgctccaaattgaaacatccccagcaattcctcaagtatccaaggtcccaactataatcttgggaatggatgtctcccatggttctcctggacattctgatgtaccgtccattgctgctgtacgtataatttttgtagttttctgtgataaataataaattgtagctactgtgacagtttatattttgttttcttaggttgttagttctcgtgaatggcctcttatctcgaaatatagagcttctgtccgcacccaatcacctaagatggaaatgattgactctttgtttaagccacgggaaactgaagatgatggtctgatccggtaagagatttttacctgcattctcattgttaagtttcataatgttttactttgctgaatatcctttatgttctaatgacgagctttctcccattactcgttggaatttgatgttgcttcagggagtgtctgattgacttctacaccagttctgggaagaagaagcctgaccaagtcatcatcttcaggtctgttaataattaggcaaactaacttttttgtggaagtaactgtttggttcagaaaattggttgcctatctcttgtttcctctgttttgttatagcaccaagctaatttgtgactaattatagggatggtgttagtgaaagtcagtttaatcaggtgctgaacattgagttgcaacaaatcatcgaggtatattttttgttagcaactctattggcaagttctatttgtgttgtcatgctttcttttatccaagtatcctgtactgtgtgctttgtccatattaacatggtcctattacctcttcaggcttgcaagtttttggatgaaaaatggaatccaaagttcacgttgattattgcccagaagaatcaccacactaaattttttattcctggaaagacagaaaatgttccagctggtaatcttcatcaacctacttgtcccttgttgcaattgtgtaggctcatttattggtggccttataattattattattattctctaatcatctcaatggttttatctgcaggaactgttgtggacaacaaagtttgtcatccaaggaactttgacttctacatgtgttcacatgctggaatgatcgtaagcataacctgcctttgtatttggccgcagtccattgttgtcgttttgagtttgttagtttgccctgaaatgagaaatgcccttcatttttaaccctacactgaagcaactgtgttctgatttaaactgccaagtgccttcacaccaccatgttgtaatctcagctgtaaaaatctccttgtgctgttgccaccttttttcagtttgtatcctagaatttaactgaaacttggttctgctgtcgcaagtttgcctaggtagaaattattgtttccctgtgaattgataaagctaattgcatgttttatttttgccaggggactacgaggccaactcattatcatatactgcatgatgagataggcttcaatcctgatgatctgcaggagctggtgcattcgctctcttacgtgtaagtaccaagcagaggctctaagaaaacttttgctacctttttgttttgttattatgaaaaacttgcgtgctcacaagggattttctgggttcttatttcaggtaccaaaggagcacaacagccatatcagttggtaggtttacttgggcaccttttctttttctgtgtcactgtcacctccagtagcttttgtgtatcagatctgcgggaactgattccattgtttgcctgcctgcagttgctcccatctgctatgcacatctggcagcagctcaggtcggccagttcattaagttcgatgagatgtcggagacatcctccagccatggcggccatacttcggcgggcagcgtccctgtccaggagctacctcgtctacatgagaaagtcaggagctcgatgttcttttgctgagcctctatagcttgctgcttcggcattggcctctaagccttacttttggtggatggttgggtctgaaccctggtagtagttatgtctggtggcagtaaacgctcttggatgctgcccataaacttgtgaacttgttgcggcatttggtgcctgcctctggaagacttaatcaagtaggatgttaaatgttagtttttaagcatcgctgcagttatgttggctgtcttgttgcagtgcttggtgccctcaggaagacttggaaccttgtaggatgtcgttaaaccatccttttaagcgttgctggttctcta

SEQ ID NO: 790 - DNA, 9347 bp, Sorghum bicolor
  source 1..9347: mol_type = genomic DNA
tgcatgtatggatgagtgggcctaggttgatgggatagcctattatggctaaaagggatgagagttgtggcttcaccatgggtgtggtagatgggtcctttccataatttttagttgtagagatttagtgtttcatacatatgctgtaagatttatgcaatggagaatctaaggccttgtttacttcccagaaaattttacaaaatttttcacattccccgtcacatcgaatctttagacgtatgcatggagtattaaatatagacgaaaataaaaactaattgcatagtttggtcgaaattgacgagacgaatcttttgagcctagttagtccatgattggacaatatttatcaaatacaaacgaaaatgctacaccaaaatttttcagaactaaacaagcctaaataagacctgagtcactgacggagaaggaaatgcggcaaccatccttttccaaggctgcccaagcaaaccgcgaaaacggaagcgacacaccgcccggcccggccgcagggaggacgctctctgctagcctgcgcgacgcttgcgttgccgctgccaccgccgccgcgctgttgaatgctccgggtccacggtgcaccaggcggaaggcgagacgccaagcacggtgcggggcctacttgtgtgtgggacgaagcccgtagacccggtgcagctggagggttggagccaggagcgcagcagcctttggacgccgacgcggggataccgccgaggaggtcctaacggtccgatgacggcgccgtaagctaacggcttcttcggcttcgatccgcctgctgcatgtccaggtgtcctccccgcacggccgtcggatcgccgcgaccgcagctcctccgtcacgctaacgccggtaccagaccggatgggacgcactgtgggctcgactgctcgggcggcggtctgcagtgacacttccggggagcgacaccttatatctcactgattggtgggaccagatatcacgcggacccacgtgtcattgatggggtgggattgcgccaggtcgccaccggggtgcgtatggagggcacacacacagtcaggtctcaggatatggttcgccgcggagggccggaggcagcagcgttccctcgacccggcagaactcaccaaagacaatgactagtggggtacaattttacggggcccgcaagtcagtggagtagttgttgcgtccgatgccgctttggcgtgcaccgaggaagtggagagcacggtgggcgttagtgcgtgaggtgcctaccgctaccgcgtccagtcctcccctccacgtgtcacctcgtctgggccccaaagttccgggctctcccaacgcacggtcaagatgggccgatcggagggccccgctagcagagcgcaccgcgcgggcgggcgggcgggtgcggaatgacctcgctgcccttctcgtccccgtcgtacaggagggcagctggtacaagaggggggtgggtgcgggcagaggagccggtgttctgtttggaaagccggagggggtgagaagttttctcgccttctcggagacgtcgccatccaccccccgcttccaccactctcggcggtaaccgaaaaccctcccctcctgttcctctctcacactcccccgcttccttccctgttcgtggaaatctagggttttggaagggtttagatcgcctgctctttgccgcggcggttgttcgtgcgccgcggatttagggagggtttctgcggtgaggggttttgcgccccctggcggtgtgttcttcgtttcttcggggggttttttaccctctttggtgtcaggatcgctgcattccggtctgcgcttagagaggtgttgtctttgtggatggattctgtttgtctaggtttttggtggattttcgtgcggttttaggatttttgttgttgttctccatcgagcaggtcgagttttttttcaagggtcattgatggtgtccttgtggcgcgcatgtgacagcgtttgggggttttgttttgtggattgattcttttttattatgccttaccgattttcatctttttttttcacatggagggttttcttgttttcgtgtttgcaatggcgaaggtgtgatttttgctcttttttcgtcgcgcatttgttcttgtcatgtttaaggcttatttttctcctcttttttgagcctttctacgtacaaaatggaggagcttattccggttttcttctttgttatctttaaaggagattatttttatttatttttgcgcgttttctgtagctggtcttatggttctccagttccatcacattgaagaagatctgcgccttgtttagaaacaaaaatcttttcaagattccccgtcacatcaaatcatggagcacatgcatgaagcattagatatagacgaaaataaaaactaattacacagtttgcccgtaaatcacgaaatcttttgagcctagttagtccatgattggataatatttgtcaaatagaaacgaaaatgctacagtgccgaaatccgacattttttcggaactaaacaaggccctgatttttatgtgtttttggggaggtttatggtggcactgttcatttctctggataaagattttaatcgaaaactcatttggtgtttgaaaggttcgttcttaataatatcagtgcgttgttctgaagggttcattcataaaggttttagtgcggcgtcgttgttaatttgggggtacgtgctgcaatttcctttgcctttttttttggtttcttggagtcctggaaatttcgccatgacattccaaaggaattttttttcttgcctttcttcccggatgtgttcccctttccaaatcttttgcatattttggtttctatatagatatatgattacataactcttattgtaatttgtttacattctcctttgtttattgttgttttattgttatacgatatgatatgcggatatgatacaattcgttttcatttgttgatgtgcagggtcgggcagaggctttgcagctttgggtcagatacagtgctctcgtgagtatattaagccacatggtttacaatttttgtttgagcatgtagaacggctcctataaaggacagtaggatgtttcggcactagttctgtcactagcaaatcttctgtggactgtggtagtgttttgaggtccttgtttagtactgtttccatagtttgttgtttattaacatttccatagtttgtgagatgatcacaatttcattttttgtgtttttaaatttgttaaatcacagcaattgtgctttgcctacctgtaccattcttgcatctatactatgcagtcactttttctcttactgctaaattgtataaagtatgaggaaataaaacaaatgctagatatttaactgttccagtttccaattgatataagtggaatatcttctattgctattagagtagtctgggctgcaaaataataaagtatcctgatgttacatttgtgttgtgtatttggtggacttgagagtaaacattgtggtttactgaaatgtatactgttaagagaatgtgtattgttgggggtgtggtataagttagggaccccccattagtgtgtaataaggcccaattactaatcataggggcctatttgtgagtgtttaggaaccagttgcagtttgtaggatttcatcatttcttatagttcatgtttctattctgctgcccttgaaaatctttagcaaagtaaatggcaacttgaattcctagtttttgttgcttaagcttgttgtactatgccgaaatcagatgtttaatctctgtttgaagtgtgatttacctgtatacttgtccttctgccacttcagttgcattgctgcttgcttgaatcatacagccagttcctatgtatatgtcttattggggttcctttggatatcactcatgcagcaaggcccactaaatggagtctcacaatggcgaggctgatgacttgcctccaccacctcctttgaatgctggtgttgaaccacttaaagctgatgaaacaaaggtgccattgaaacataggactctggtccagaggaatggctttggcagaaaggggcagcagataaaactgctaacaaatcacttcaaagtttctctcatgaatgctgcagattatttctatcattactacgtacgtctcttatccttgtctagtgtcatctctttattttcatcctcataccttcattattgatgctgttatcttttattggctgcaggtcaacttgaagtatgaagatgatacaccggttgatcgcaaagggtcgggaagaaaagttatagaaaaactgcagcagacttatgctgctgaacttgcaaataaagattttgcatatgatggtgagaagagcctgttcacaatcggtgctcttcctcaagttaaaaatgagttcactgttgttgttgatgatgtttcaactggaaagtaagcctcagttattttgatcgatttgtcattatctactctgataattatccctaaagattaacttgactatcttgctttcaggactcctgcaaatggcagtccaggaaatgacagtcctcctggaagtgacaggaaaaggatcagaaggccttacaatacaaagacgtacaaggtcgaactctcttttgcggcaagaattcctatgagtgcaatctcacaggccctcagaggtcaggaatcagagcacacgcaggaagcaattcgagtgattgacattattctgaggcagcactcagctaagcagtatgtaactgtttcatgcaattcagtattacaaatattgctgatattattgatggttcttgcagtgtagccattctgtcttttaactgtgtccctttttgcttgcaggggttgcctattagtaaggcaatcattcttccacaataatccttctaactttgttgacctgggtggtggtgtagtgggctgtagagggtttcattctagttttcgtgcaacccagagtggactttcactcaacatcggtctgttcttgtacccattttccctgttttaatctatacaatacaatgatcatttctctctatgcagttaggtggtaatgtttgcatgtgttaatatgttgtgcagatgtgtccaccacaatgatagtgaaacctggtcctgtcattgattttctgcttgccaatcagaaagttaatcatccaggcatgattgattgggctaaggtaaggcttcatgcttaatacaacaaataggaggttgagttccattgttccatttcaccatactttggatttatatttttgcaatttgttatacttatgtaggccaagcgttcactgaagaacttgaggatcaaaacaagtccagcaaaccaagaacagaagattgttggtctcagcgacagaccttgctgtgagcaattgtaagtagagtgatgtgttgttgtttgaaatgtttttatattgtttgcactttattttgttctccaacctcatcctgagttctgcatcttagttatttacatcttctaagtacttggtgatttacttgcgtatgtagattcacactgaaacataagaatggtaatggagactctgaagagatcactgtttatgattacttcgtaaagaaccgtggcatagagctgcaatactctggtgatcttccatgtatcaatgtgggaaaaccaaagcggccaacatattttccagttgaggtaactattatttgaatcctagtgtttttcctttgctgtaaagctctttccctctaatgttgtgaagattgtttctgtgtttaccagttatgcagtcttttgcctttacaaaggtacactaaagctttgagcacacttcagaggtcatcacttgttgagaaatctaggcagaaaccacaagaaaggataggtgttttgtctgatgtgagtgtttttgtcaattaaacctagcaaattttccttttgttattatatataccaataacaattggcctagcaagttgggttatagccttatggtgtggttttcttgaaacttcaaattttttttcatgtcaaattgggtaggtactgcaaagaagcaactatgatgcagagcccatgctgaaggcctgcgggattacaattgctagaagttttaccgaagttgatggtaggatactgcagccccccaaggttggtcattactgtttatcctttatcatttcagatgttctttgtggttatgaaattttgaaggcataaattttttctgtcctatggttcagcttaaagctggcaatggagaagacatttttacacgcaatggtagatggaacttcaacaataaggtaagaatgtatagtatattctttcttttgtgtatgtggattttcgtgatgccacatgtaatatttggaattctgtttttcagaggctcattaagggtagcagtgttgagaaatgggcagtggtcaacttttctgcacgatgcaatgtcagggatcttgtccgtgatctcatcaagtgtggaggcatgaaggggattgtaagtttattttctcattatgttgtgcatttccagatgtgctctaattcatgtttgggatttcatttccacatgttcttatttacttgtttcgtgttgcagatggttgaagctccttttgatgtatttgaggagaatccttcgatgagacggtcgcctgctgtaagaagggttgaagacatgtttgaacaagtcaaaaccaagcttcctggagctccgaagtttcttttgtgtgttctagctgaaagaaagaattctgatatttatggttggttactactaaatcgctgttaacttctgtggcacattttgtttgttctgtatcactatgccattgacctttacagggccttggaagaagaaatgccttgctgaatttgggatcgttacacagtgcgtggcaccaactagagtcaatgatcagtatcttacaaatgtcctactaaagataaatgcaaaggtctgtttctctttaccatgagatttgagagcatggcaacatttgtacattgcaattacatatttttggtatttcgtcccttttcaaacagctgggtggcatgaattcgttgctccaaattgaaacatccccagcaattcctcaagtatccaaggtcccaactataatcttgggaatggatgtctcccatggttctcctggacattctgatgtaccgtccattgctgctgtacgtataatttttgtagttttctgtgataaataataaattgtagctactgtgacagtttatattttgttttcttaggttgttagttctcgtgaatggcctcttatctcgaaatatagagcttctgtccgcacccaatcacctaagatggaaatgattgactctttgtttaagccacgggaaactgaagatgatggtctgatccggtaagagatttttacctgcattctcattgttaagtttcataatgttttactttgctgaatatcctttatgttctaatgacgagctttctcccattactcgttggaatttgatgttgcttcagggagtgtctgattgacttctacaccagttctgggaagaagaagcctgaccaagtcatcatcttcaggtctgttaataattaggcaaactaacttttttgtggaagtaactgtttggttcagaaaattggttgcctatctcttgtttcctctgttttgttatagcaccaagctaatttgtgactaattatagggatggtgttagtgaaagtcagtttaatcaggtgctgaacattgagttgcaacaaatcatcgaggtatattttttgttagcaactctattggcaagttctatttgtgttgtcatgctttcttttatccaagtatcctgtactgtgtgctttgtccatattaacatggtcctattacctcttcaggcttgcaagtttttggatgaaaaatggaatccaaagttcacgttgattattgcccagaagaatcaccacactaaattttttattcctggaaagacagaaaatgttccagctggtaatcttcatcaacctacttgtcccttgttgcaattgtgtaggctcatttattggtggccttataattattattattattctctaatcatctcaatggttttatctgcaggaactgttgtggacaacaaagtttgtcatccaaggaactttgacttctacatgtgttcacatgctggaatgatcgtaagcataacctgcctttgtatttggccgcagtccattgttgtcgttttgagtttgttagtttgccctgaaatgagaaatgcccttcatttttaaccctacactgaagcaactgtgttctgatttaaactgccaagtgccttcacaccaccatgttgtaatctcagctgtaaaaatctccttgtgctgttgccaccttttttcagtttgtatcctagaatttaactgaaacttggttctgctgtcgcaagtttgcctaggtagaaattattgtttccctgtgaattgataaagctaattgcatgttttatttttgccaggggactacgaggccaactcattatcatatactgcatgatgagataggcttcaatcctgatgatctgcaggagctggtgcattcgctctcttacgtgtaagtaccaagcagaggctctaagaaaacttttgctacctttttgttttgttattatgaaaaacttgcgtgctcacaagggattttctgggttcttatttcaggtaccaaaggagcacaacagccatatcagttggtaggtttacttgggcaccttttctttttctgtgtcactgtcacctccagtagcttttgtgtatcagatctgcgggaactgattccattgtttgcctgcctgcagttgctcccatctgctatgcacatctggcagcagctcaggtcggccagttcattaagttcgatgagatgtcggagacatcctccagccatggcggccatacttcggcgggcagcgtccctgtccaggagctacctcgtctacatgagaaagtcaggagctcgatgttcttttgctgagcctctatagcttgctgcttcggcattggcctctaagccttacttttggtggatggttgggtctgaaccctggtagtagttatgtctggtggcagtaaacgctcttggatgctgcccataaacttgtgaacttgttgcggcatttggtgcctgcctctggaagacttaatcaagtaggatgttaaatgttagtttttaagcatcgctgcagttatgttggctgtcttgttgcagtgcttggtgccctcaggaagacttggaaccttgtaggatgtcgttaaaccatccttttaagcgttgctggttctcta

SEQ ID NO: 791 - DNA, 8630 bp, Sorghum bicolor
  source 1..8630: mol_type = genomic DNA
gggatcccacgtagtgatttttctggcgaaacagcaacatacaatttgtttgataaatattggtgatggataagggcactcctaatgcaagactctatcatagagttcaagacaattaatcacatattatttatggtattttgctgatgtggcaccgtatttattgaagaaagaggtagaaaaaataagactccaagtcttatttaaactctaagtccatattgttcgaggtaataaataactttagactctatgatagagtctatattgtgagtgccctaaagatttaacctgtatggaaatttggatattgattgatcctaattcctaaataggtattgtgcgtgtttgttacgaatttataaggcgaggcagacatccacacgtgagttgcaaaccaggagacgacatgagtgatgcgaaaccaatggaggttttgcaactcgaaaaccaagagaataagaaatgacaactgagagaccggagactagctatggacggacgggcagaggagacagtgagagataaaataaataaatttaccacttttataatgttaaccgtaaatatttacaaatatgctcaagcattatgacaaggcatacaatttgttgtggagtgttcgtgccaatacaataagttagctatttttctaggatttaattattttatggctcaatcttaaatcaaataattgcaacgtgtaacaaaagaccaatctcgtatagaaaaagtgaatgaagattgagtcgacttaaatgtcaagcaattatatataccaattatgagtttaagaaaaataagctacactttcatatatgtgtcgagatgcatatgattatactcctttcatcctaaaataactatcgtttgtgcatctcaagaaaaactttgactaatatatatattaaaaaatattaatatatattattcataactagtaccattagaaaaatgtttgaatctacttttttaataaatttatttggatacataaatattacatatattttctacaaatcaagtcattacatgttatgatgagctaaaagtcatggcatgagtgttgtagtgccaatggagattttacggctttaaacttaaaaagcgagaccgatagtgtcttaaaacagtactaaatatattatgtcaaatttaactgaattatataaaaatagtaatatttattatcataaataggtattattagattttatgaaatatattgttatagtatgtatatatattaatatgattccttttataaatttagttaaatttaagatagtttaatttaacgaggcctagaactatagaggagaggtgtagatgggccttatcatctttacatgtccacttttcaggcccggcccagctgaatgtccagatgaacgtgggctggccggaggagagaccgaggtggagtgtaaagctgcccgccgttcgagggagcagctacgcatttaagctgggggcagtcgcagcagtgagtgggcagttcaggcttcggggactggaggagtgggagaggagaggagcaggacctgggagacctcgcttcgcccgtcctccagtcttccttgcttttcgattttggtaagtggaagtgattccaatccttcctccttccctccccctgtttgatttgatgctatgtgattcatgtcttgtcctgttgtccatgcactatttacaaatctgcaatgctgctgcatgcgtaaaccctagccccctcgccgctgaaaccccccacccccattcgttcctctttcatttcttacggcagatgcagcttctgctttcctagggttttcgggacatttggttccttgcacccagaggacgaagagctgagtccctttcctgctgccgctcttggtcctcacactcgcagatttgtttatctttctttaaaaaaagagaaggggggagggaggatagccccctttggatttttaggggttcacacgtttctggatgcttttgcagcgatgcgattcatctcacaggggtttcctaaattaccgtgcctttttttgggaaataaaaaataaatgtccactcttttgtgtaggccttgtttagttccgaattttttttgtttttcgagaccgtagcacttttatttttatttgacaagcattattcaatcataaagtaacaggcttaaaagttcatctcgcgatttataggtaaactatgcaattagtttttattttcatatatgtttagtgctctatgcatgtgccgtaaaattcgatgtgacggggaatcttaaaaagtttctggtttttgggtgaactaaacaaggcttaagaaaaacataaagacgagtgcttgaagctgcgatgtctgctgttcaggtggtttctcaagaacacttttttaaaataaaaaagcccatttttttttctgggaatgtgaaagaaggtgcatggtgccgttaagtcgtcaacttcaccaaaagcttccatcttttttcccccttacctaaaccttgtttcaacaaaatgctgcctttggccaggggcatctgattgtcttttaaatctgtgattctttttttagaaggaaaaaaatctgtgattcttcgagtcaacattacgctcattttcttcactgtgatctggcaacctacagtcgtatttctttattattagtaatgtcctgcgctcgagttcttgtgatctgcacagtataatgctgccaccaaaaggatgcaattagacaagcttaatggtgcatctgatagactgtacaaaaagattcgtgtcccaaatgtgtccttgctaatcaaggaggtcatatgaacaagtaaaacggaatttctgcattagcaaacaggcacaagactgagtgacgtggctagtgccaatgagttgtgaactcgggaatggaattagagttatagctattcctatcatttatttcaccacagaggctttgcattttacctgaatctgataaagaagtaggcagaaacatggagcttatagtgttgaagattgtaggtatagaagctaggtatcagaaagattcaactttgtgattgtatgctgcacatggtattggtaaaacattctttcaagtgctcattgtcttcccttgcaccaattcattgttgtccttgtttctttgcagagggtgctgcttgttttatcttaaaatggggtctcatgatggtgaggatgaagagttgccaccacccccgcccgtgccaccagatgtggttcccattaaagctgaagatgttgtgggggaaccaccagcaaacaagccaataaagccaaagagattactgatggacaggcctggtataggaagaaaagggcagctagcccagctctattcaaatcactttaaagtcgccgtgaagagcacagaagacttcttctttcactattatgtatgtcttcttactgagttcacaatcttctgttcaaaatatatcattgtgtgtcccttgtttgttaataacttatctttggctgatgagatagtgctgttttatttgaataggtgaacctgaagtatgaggatgatcaacctgttgaaggtaaagggattggcagaaaggtgattgataaactgcagcagacatatcgcgctgagctttccaacaaggattttgcatatgacggagaaaagagcctgtttacagttggtgggcttccacaaaaaaacaatgagttcactgtcgtcttggaggacgcgtctactggaaagttagttttattctttgatctgctttcttgtttatgcttaggccttgttcagttggcaaaattttgatatccaatcatggagtaactaggcttaaaagattcgtctcgcgatttacaggcaaactgtgtaattagtttttattttcgtctttatttaatactccatgcatgcgccgcaagattcgatgtgacggaaaatctaatttttttttgggaactgaacaaggccttatccagaatcttactttgtaattgcgatgtttgtttgtttatttatttatttattggttgtaggactgctgccaatgggagccctggcggtaatgacagtcctggaggtggtgacaggaagagagtgaggaggccataccagacgaaaactttcaaagtggagataaattttgcagcaaaggttcctatgagtgctattggtcaagtcattagaggcgaagaaacggagaactccctggaggcacttcgtgttcttgatatcatactgaggcagcattccgcagaacagtatgtagctatgcatcttcatggatgatttataggtagatttgaggatcttctgcagttagatcatggcaatttttctcactacttgcagaggctgccttttggttaagcaatcgtttttctacaacaacccttcaaactttgttgacttgggtggtggcgtgatgggttgccgtggatttcattcaagtttccgcggcacacagagtggactttccctgaacgttggtacgtatttgtcctgtattgctgtactggtgccatgtaactgcattgtctattatgtaatcttttacatctttcatgatcacgatagcttattttttgaaatccgcagatgtctcaacaacaatgatcgtgaagcctggccctgttattgattttcttctttctaaccagaatgttaatgatcctagcagaattgattggcaaaaggtaaattgcatctttggatataactttttgaacgatcacgctactgcattgaaatatctattttggtagaatggtaacactattttggggtgtgcatattcaattcaggccaagcgtgctctcaagggcttgaggattagaaccactcctgcaaatgcagaattcaagatttttggtctcagcgagaggatttgtaaagaacaaacgtgaggacatgttttcttgctgttttgtttatttcatgcgtgctttacttggtatttgaaaaaaaaaaaatgtaccctagtgtgtagcctgtttcagaagagttttgttcagcaagtattgcttttattaattgtgttctgatatcaatgccaagcttgtttgacagagatattcttgtgcttaattgctttctcatcaacatatgcaattaggtttccgctgaggcagagaaatggtagcaacggagattgtgataccattgatataactgtctatgactactatgcgaagaaaggaattgatctaaagtactctggtgatttgccttgtataaatacagggagggcaaagcgtccaacatattttccaatcgaggtttgtttcagttttgttagtgtacatcctatcaaatctctgtttattaaatatatcttgcatctcatatttttgtattgtgttactagctatgctgccttgttccgcttcaaagatacaccaaagctttgtctacgctacaaaggtcatcccttgttgagaagtctagacagaagcctcaagaaaggatgacagttctaaacgatgtgagttgttaccttgattttagcatgctgcaacgatttataactgcatgggattggtttctatgactgaattaatcaacagcttatgattaccctaaatgctaggcactgcaacgcagtaactatgattctgaccccatgttgagggcatgtggcgtttcagttgctccaaaatttacccaagttgaaggaaggatccttcaagccccaaaggttggtgacacttctctaagctttagttgttttctcactaaatgttgtaccaaagcattatgtcagcaaaatgcatctgactaaatctaatatcttgtagctgaaagccggcaatggtgatgatatcttctcacgaaatggacggtggaatttcaccaatagggtcagcaactcagcatgtttcttttttaaccttctctagttcttggttaggaatgatctttcttctgatgtttatttgccaattctttgcccctttcagaagttttatcaaacctgctctgtggataagtgggcggttgttaatttctctgcacgttgtgatgttcggaatctcatccgtgacctgatgaggaatgcatctgcaaagggaattgtatgttttagcttttcacacatcttttattgtaacagttttctgttgcttaccttttcttctggcagcaaatggaggaaccttttgatgtgtttgaagagagcccctctatgaggcgtgcacccgtgtcgagaagagtggatgatatgtttgggcagataaaatcaaaacttcctggagctcctaggttcctcatgtgccttctccctgagaggaaaaattgcgaagtctatggttggtttatatttggttaccactgttactcctccatataaatatctcacacctttgcaataattatacctttttggtttcaaccaggtccttggaagagaaagtgcctggccgagtttggtattgtcacacagtgtctagctccaacaagagtcaatgatccgtacctgcttaatttgctgatgaagattaatgcaaaggtttgagacatgattttgtcttcttgtgcactgtattgttcactgatgcatgcttataccatcctttttcccctgttttaaccagcttggtggtctgaattcgttgctgcaagttgaagcatctccatcaataccccatgtgtcggaagtacccaccatcatcttgggtatggatgtgtctcatggccatccaggacaagataggccttcagttgcagccgtaagatgtgtataccttgtacaattcctctgcccacatggaatctgatgtaaccataactttcctctctgtttaggtggttagttctcgtcaatggcctcttatctctaaatatagagcatcagtgcacacccaatccgccagactagaaatgatgtcctccttgtttaagccacggggtactgatgatgatggcctcattaggtaagtaatatcttcttactatgtggatgtatataatatgtatgttaagcgtgatgacttttgaatactaagtttatcttcatatttgcgactttcagggaatcactgattgacttctacactagctctggcaagcgaaaaccagaccacattatcattttcaggtttgaagttttgtggttattatttgcttaatgcttatatcactaaatccttttgtagaaactaaaaaatattgggaagtatggtacattctttactggaatggattattgatactttcttaaccactgcagtgttaagtctaaccatttgctggttttagggatggagtcagcgaaagtcagtttacccaggtcatcaacattgaactggatcagataattgaggtaatgcatttgttttgatttgtccttgcacatttgcttagttcacaacgaatgccgtattccccacaaggtaaatactcctgattgcacattcttctaattaatgcaggcatgtaagtttcttgatgagaagtggtcacccaagttcactgtgattgttgctcaaaagaaccaccacaccaagttttttcagaccggatcaccagacaatgttcttcccggtaatgtttatttgtaacgaatttacaaattgacttaccgtttgcatgtgaattggcagtgtcctgtgagatgtggtgacaataaatgtgttattctgtaggaactgtcgtggacaataaagtttgccatcctaagaactttgacttctacatgtgtgcacatgctgggatgattgtaagtttgtgtctgatctctgaatgagcttgtccagagcaaaatgctgttagttacctctgaatcctagattgtttaagtgctaaataaatactggtatgtgcttgctgctcgtatcagggaacaacaaggccgacccattatcatgttctgcacgatgagataggtttctctgctgacgaaatgcaggagtttgttcattcgctctcttatgtgtaagtagtaaactttggttgctgcatttcactgtgactagttgctggctgtagtacctttgcttatgctgttgccgtgtcctgctatgcaggtatcaaaggagcacaacagccatctcagtaggtatgccacagaatcccagtttaccattgctgaatctgaagcattatttgcagcacagcagatttactctgtgtgcacgctttgtttgtgtttgcagttgctccaatctgctatgcccaccttgctgcagcccaggtgggcacgttcctgaaattcgaggagatgtcagacacgtcctccagccagggagggcatacctcggcgggcagtgctcccgtgccggagctgcctcgcctgcatgagaaagtgaggagttccatgttcttctgctgatgtgatggtccatcaggatctgggagcgtttgaactgattttggttagcggtagtgatgtgtatgtgtgtgtgtgtatggcatgcaaccagcttggaaccttgaaggctcgcttgttgtgccaacctgacttagctgctggatgcctgaatgtagaggcttttgtaggagaaccagtcagcagtccttgtgtatgcggtgttactgtcagcagctaacatcctagtaaagtttgtctgtggtgtaatgaaccttcacttgataaccttcacttgatgctagctaagctcccctatggatcgatgatgccttgtgctgtt

SEQ ID NO: 792 - DNA, 4124 bp, Sorghum bicolor
  source 1..4124: mol_type = genomic DNA
cgcgaatgccaagatctaggaggtgagcgttgagggcaagggcggggagtagatgcccatcaaattgggttcgctccaattccttcgatttgggcagacaagtccaactcgcatctggtgggaatatactacatgtgggttcgacctagacccaatgaacttcaaacaacactgaaaatgggtctaacccgctatacaaacgcatgcttagagcatctttaagagcctttctaaatttcactctctaaatcttcatttagagagtcacttgcataaaaaccgttttctatgtcttttcattctccaacagtctttctaaatctcatgcgtactctagagagtcattctcgttttctatttttagctagcgagaaattcggaatagaaaatgaccatatttggatagccatttagaaaagttgttggagagtagtttctttactaaaacctctattctcagtatttaaaataaatttagagagtatcttggagttcctaggagcctagcatgacccgctatcaaaattcaaggattctgatatgaggtgggtaaaaaaattaggtgagaattattatggatagattaattggtgactggtgcctagtagtgtcagtaataataatgaactactattactggtttcattttcacgtagttgagcaataatacaagtgcacctcttcattggccaggtgggtggtatccctgtcttcatgtcagtgagactaaataaactgaaacgacacagcacaaatgcaagaagaccagaaggcaacagccataataacgcggcagcgtctgtctatataaaagaagaggagggttttctggcttagcctggccaagaagaggagggggttttgcagaggaggagcaagaagtgggttttctggccttccgctgctgtcctcgagctccattttggtatgtaataccttcgccttcctgctcttgttcttcttcgtttctcgatctcacgcctcgccttccgttactacctcctgctgctcgggttgcttatatctcttatttttcttgttggagaaggcctggcctgatgcttgcatcttatgacacatgctgcgttctattgttggataaatatcatcccgtgagttggtgattttgggattgtggcttttcatatcctctgtggaatcttggcttaaatttgtggtgatgatcttgggtttgtagtttgttcccaagagtatcgaacagaaatgattggaaatgtgttgtcgttcctccatcctgtttttcttttttttttaaaaaaatcttattgtattttaactgtgtttagtaaacaattgcatactgctaatctgttttcccatatttggaagcagtaatcaagtttctcattcagtctaatgtgtgggaaaaaattagatggaattggtgcaatgcagaagctgtcccttgagatgagtggcggtcacttctatagttacaacattttgctgtgttttcattgcagacaaatctggcctaggatggaatccagcggtaccaaggatggcctcaacaaggcgccaattcttcagagactcccaatgtcgaggcctcatgggtctggcacaaaagggaaccaaatacggcttcgtacaaaccacttcaaagtctcagttcacaggactgatgtcatcttctaccactacaatgtgcgtgtggttctgatatcctaccttctgatctttttggaccctaaatcctctcttaatttcacacattgttccactttcaggtgagtgtgaagtatgaagatgataaaccagttgaatcgaaaggggtaagtagaacagtgatcgaaaagttgcaggaaatctatctggcaaatgtggactttgtttacgacggtgaaaacaacctatacacaatgtgtgcccttcagaatgtcgaggatgcgttcatggtagtagtggaggatggttcatctacaaagtaattattccaccttaactaaccttttctcatgttgtttatgatcttgagctaatctgtcattggttcaacaacttatcttggtttcaggagtgctaggagtaggacccctggaggaaatggaagtccagaaggaagtgacacaaaaagaatgaagcggcccatgacttgtaagacgtacaaagtggaattgaaatcagtgggagaattttgtaaagaaaaaaaatcagtgggagaaatcccattgagtgccattgacaaagtcctgagaggtcaagaatctgatgattgtcaggaagcccttcgggttcttgacatcatacttaggcaaaagtcagcgaaacagtaagtgatacctttttgataagactggttctttaaaacgattttgttaacaactgatgcaaaggtttgttaaatgtcaatctttttgtttctaccaatagcaagagctaaatatttttgttacatataaactccttgcttcactgaatctttgctctttttgtctgcacttcccaggggttgccttctagttaggcaatccttcttccatagcccttccgagcccattaagttgggtggtggtgttgtgcgatgtccaggatatcattccagctttcgacccactcaatctggactttcactcaacatcggtatgttttccacaggctgaatgatattacttgtaatcagatcattcctaaacagtctacgacaaagtgatagcacattacattcaacttttttcaactggtacagatgtgtctacgactatgattgtggaacctgggcctgtcattaattttatactgtccaaccagtatatcaaggaccctagcagaattgactggggcaaagtaagtcatggccttgatgcaactcatgttttcccccaataatgtggtagcccaagattgactactcgaccagattactccaatgctcagttgacttgtttttttaggcaaagcatgcattgaggaatttgaggatcaaaaccactcacactaactctgaattcaagatttccagcctgagtgagaagtcttgctatgaacagaagtgagacaattaaattcttggatttgatgttattcagcaaggccagctggaggttgtttaacatctaattcttgattcaggttcctgttgaagcaaagaaacggcaatggacccgatgtcgtggaaataacggtctatgattactacttgaagcattgggatataagactgcaggattctgctatttttccctgcttggttgttgggaagcccaagcgtccgacatatctaccgatagaggtctgtcgattttgtttcattaaaaaaattgtgccaatgcagtccaggtaaatcattcttgttttgtttgcgcataacactagaatctgtctacaattatcagctttgccatctagtgtcactgcaaaggtacacaaaggctctgactgtactacagcggtcctcgctggtccaaagttcgcggaagaaccctagagaaaggaagtcagatttgtctagtgtaagttcatttttttataacgaactggtagttagctctgcctttcaattaagatagggtaaagaggttcatggtgtaagttcatccatggacattattttgctcactgccatagcctagttcgattaacattttgactaataacatcattaccaggcactgcaacgcattaactataattcggatgacatactgaagaagtgtggcatttcaatagctccagagtttgctcaagttgacggtagaatccttcaagcgccaaaggttggccagaacttccctagttcccctttcttttttccaggctcttcggtgtgctgatgatgttgcacacttggttacggttgtcatgtgtagctaaaagctggggatggtcaagatcttattgcacgtgatgggaggtggaacttcatgaacagggtaagggtctcttctgactttagtccttagttccttacaatatcgcattaatcttttttgctgttgtgctaacaacaatgcccatattgtgccattcagaagctctttgaggccaagggagtgcacacatgggctgcagttaattttacgacaaggtggaagcttcaggatcttgttcggaggctcattcactgtggtgacaacaagggcattgtaggtctatgtttctaa

SEQ ID NO: 793 - DNA, 6184 bp, Sorghum bicolor
  source 1..6184: mol_type = genomic DNA
tcgaaatggaagcattgaaattcaaactgtggatatcactgttcacgattattttaagtccaagcaagttgaactaacgatgccttatctgccatgtcttgatgtgggaaaaccaaaacgccctaattatctcccaattgaggttgcaaccctgcttttgtttcagtctacattctacaatgtagtctggttatcataggtcccttttttagataaaggggttgtcatagtttctgactgcacttgatgtttgagttggtgccattaaaatttctattttgcagttatgccacatgttatcacttcaacgttatacaaaggcactgtcttctcaacaaagggcaacgttggttgaaaagtcgcgacagaaacctcaagaaagaatgcgagttgttacagatgtgggtaaattctgtcaatgttattactcctccctgctttctccccttaacttggtacttacagctaaaatgtgcaggctgtaaaaagtaatatgtatgatgatgatccaatcttatcttcctgtggtattgaaattgacaaacaacttactcgtgttgacgctcgtgttctctctgcaccaacggttagcctattttgccttttcttttcattatcacactttcgtatatgagtcatgttttttaattgtttggattgatatgctattcagctagttgtggggaacagtgaagactgcatcccgaacaggggcaggtggaactacaataataaggttgttactacactacttgtgagagaacacatttatctcagaacattgtgctgaacttcaccttttttttcattattgcagaggctattggatcccgtcaagattgagcgctgggctattgttaatttctctgctcgttgtgacatgagccgaatctcaagagagttgataaactgtggacgcagcaaaggcattgtaagtattttgtggtattttgttttcttgcatggtttgagggatgggatggcgatggatcatctcaagttctcaacctaacaaacttcgtttgaggaaccaccacaaacaaaagattagtataacatgaggaatggtgtgatccaaataaaatttgggattaccccatgatgggccacactatccttgttggggttgatcctgatccttaaaaccaaataccccacgaaagcttgaacatatttagcattcttattatgctgtgctttgaccgtacaagttatcccttgttttgtgcagctcattgaacgacctcacaccttggtggatgaggacagccagtctaggagatgttcacctgtggaaagggttgaaaagatgtttgaaaaagtcaaaacaagccttcccggtcctccagagtttctcctttgtgttttaccagagaggaagaattgtgatatttacggtaatacaatatacagttactgtttctatgctaccatgtatcctttatgcaactaaacttaaaatgccttgaagggccatggaagaagaaaaatcttcatgaaatgggtattgtcactcaatgcattgctcccagtaataagatgaatgatcaatatttcaccaatgttcttctgaaaattaatgctaaggtatacatttatcagcatctgatttgtgacccatatgatttgaacatagatcctgttattagttttctttcttgactaatatgatttttcctgtcgactagcttggtggaatgaactctaaactggcattggaacatcgtcaaatgataccagttgtgactcaaataccaacattaattcttggcatggatgtttcgcatggttctccaggtcgagcagatataccatcaattgctgcggtgtgtcttgttctctcttgtgttacttgcatcatgcgaagattggttttcacattacttttcatatacctatgtgcagtctagtttaattgaacagaaagcccaataatttgcaccatgtttagggaacaccaatatgaatgttatggcgaatgggctgaagtgttatggcgagtgtgttggttcttgccctggacttgctgcatcactgtctacgatagttcacggtttgttagtttgttcagatctgttagcagatagaattgatttgttacttggataagatttgttaggagttctgttaggtgtctagtttataaaggcagctgtgaggcatatgttaggcaaacgttctccctaatgctgatgtctccaggggctcccaggctcccctgtggttgcagccatctcagcctacaacccacatgcatgccatctctactgagcaccccacctgggacaaggctctggcgatttccactatggttgttcagcaagcagccttgttcttatccaacggatatatatctggttcatctaggggagtcaaagccaaccggcgctgtgggcttctttccatgggaacatgttttgctgggttgcttatcatttcagcctccagagaaggcctgaccttggcctgtggcaacacacatgccatgtttcatctgacccctgttatagtgcatccattgttacttgtgatcctttgtggcctgacgtgctgtatcagaagctgttttggtattagtttgttagcaggtaggtttaattagtgcaacatcctaccgcactggagacattccattcgtcaccttcggagctgcaagcacctacttcagcctatcacagcttaaggacgagctgtcttcgaagggtgctgaagtgttatggcacgtgggccggttctggccctggacatgttgtgtcacaacctaggattaggtcacggttagtttgttcagatttgttagcagatagaattgatttcttacttggataagatttgttaggtgcctagtctataaaggcagccgtgggcaggcagaaatagatctaagaagcagctcagagcctccagagggagggtgatttagtcgatctatctgctattcttgtatcccgttccccaatcaatctactacaacaatgagtttatgacactattctgaaaatttagagcactgttacagcttgctttcctagtttatgattgctggtttcaggtctctttttattgcctccccccatgtcaatttaggtaggggaagactgaaattgacatggggggaggcaataaaaagagatttgaaagttttggatatacctaaagacgtgttttcataggagtgcttggaaagcagctattgacgtccctgaactgtgattaggggctcttgttgggtttcaactctagcctaccccaacttgcttgggactgaaaggctttgttgttgttgttgtaataatactatgctaaagttttcctctgtaggttgtgggatctagatgctggccattgatatcacggtatagagcatcagtgcgtacccagtctccaaaggtagagatgattgattctctatttaaaccactggatgatgggaaggatgatggcataatgaggtgatttaaattaacatcttgtcagttttctgtgttatgttcttctagttgacctcacggtatcttcatgttgtatgaagtaatttttctcaggaagtggggccttagtctgttatctaaaagagaacaggaatggcctagtacccttttcactttttcattgcattgcagggaacttctactagacttctaccaaaccagccagcaaagaaagcctaagcagataatcatcttcaggtgtgtactgagttaatttttattttcagttatatatgcctatgattgtgtcatacaatgatataaaaggcgcatttgtttgcagtacgagtttgtaagagtgtgttggtgtgagcatggtgggtgtgctgtaatttatttgttatctccttaatgcaatgatatgcaactctcctgcatattctacaaaaaaaaagtgtcatacattgttaagctgtgctgaatgtgtacgtcaccattttttttctccaactcaaaggatcattattttagtgcaaactggaatgatttgttttcttgaatgatcatattttggtgattcaaaggaacatttggtctttccatgttaatttggttgtgttaatttagcataacatctagtaagatgtgtttgactccacagaattttaccaatcttaagccaggacaagtcaaatatctgtagctgatttagtatctctctagttattatcggtttcttttgtaataaaaagctatcatttcgtaccagcttttcttaaaattgtctctgcagttcttattgaagtgtgagctcttttgtgttaaaggatgaaaatcagtttatagttcagagttggctttactttgtgtgaattgaagttgatacacttcaataagaagttgatactcagagttgaaaattaaatgactcagagttgaaaattcagttggtgtcctttgattaaattactcaaattactcagagttactcaaattactcagagttgaaaattcagttggtgtcctttgattttccttttgagaattgaagttgatacacttcattaaatgaatgttatatttgagtaattttgtacagtatggttaattatatcatgtatgttcctttctatttattttgtggatgtgagggtgtctttgtggtttcttctttctgtattgatttgctttttttgttcctgcacgatgatctgggcattcactggtgctgtgacttttctagtgtttctgttcttggtattcagtgttgatgaattcttatccttatggtctacttatgcagggatggtgttagcgagtctcagtttagccaagtactgaacgttgagcttaatcaaatcataaaggttctgctatgcactgttttgcttgagaattccttggttttctggcatttcctaacaagagttagacaatacaggcatatcagagtatgggacagggggaccttccaaagttcacagtgatcattgctcaaaagaatcaccacacaaaactcttccaagctgattcaccagagaacgttccacctggtaagcacccttgtccggttgtcctgcttaatactgctaaagattcttcccctttaaacagcttgagcaacttgcactttgtctttgcatcagggactgttgtagactccggcattgttcatccaagacagtatgatttctacatgtgcgctcatgctggaccaattgtaagttctctagagtagttttggattttgcttgaccatgcttgttagtaattgcttaactggggatgtgtcagacatgtttcatattgagcactaccatgttctcttacatagggtacttcaaggccaacccattaccatgtgttgcttgatgagatcggcttctccgcagataatctccagaagctagttctttcactttcatatgtgtaagcacatatgttcatgtctatttccttatttcgtactcttatgtgaggataacatgtttgtgcttgtataggtaccagaggagcaccactgctatttctgtgggtacgttgatgttttcttttgtactaaaaaaacgtcacgcactgtttgatggttcttcctattttaggagacaatagatgctctctctctcctttttttctgaatgcagtttttgctttttcagtggcacctatctgttatgcccacctcgcagcagctcagatgggccagttcatgaaattcgaagagtttgcagatacatcgtcagggagtgtcaattcatcatcgtcagcatcaataccagaactgccacggctgcatgctgatgtctgcagttccatgttcttctgttgaggtgattttagtttgaccgttgtggggtagggctacttctttctgaaggagaaccttatatgttggtacacagcaggttaactgttttgtgaagaaaccaagtaggttgttagttgtcgcaaatcatgtacgccagcatattttggagcagttttgggctcccccccaccccaccccaaaatgtaggtacagcttccagattttaggtagcctggacgtttgcatctgcaggtttttcgattggaatctagaagattttagggatattgagagagtagagccagacctttgaggtgaaggatacttggttaaatgatctttctgttaatccccaaaatgcgtgtgcattgggggggtataaaaatgagttaaaatttctgtatctcgcatggcatccaattgtactcgagtgtttgtgctgtac

SEQ ID NO: 794 - DNA, 10803 bp, Sorghum bicolor
  source 1..10803: mol_type = genomic DNA
gatgaaaacaaaaactaactacacagtttgctcgtaaatcacgagacaaatcttttaaacctagttactccatgattagacaatgtttgtcaaataaatacgaaaatgctatagtgtcaaaatctaaaattttttgatctaaggccttgtttagttccgaaacttttttggatttcgatactgtagcatttttgtttttatttgataaatattatccaatcatggactaactaggctcaaaagatttatctcattattttacaggtaaactgtgcttttagtttttttgttttcgtttatatttaaagctccatacatacgctgcacctgcaagattcgatgtgacagagaaccttaaaaagtttttaatttttggatgaactaaataaggcctcggtgacaaacacacacccccaacccctacccccaccccacccaaaaaacaaattgaggccttgtttagttcccaaaaaatttcaagattccccgtcacatcgaatcttgtggcacatgcatgaagtattaaatatagacaaaaacaaatactgattacacagtttacctgtaattcgcgagctgaatcttttgagtctagttagtgcatgattggataatatttgtcacaaacaaacgaaagtgctacagtagccaaaaccaaaaatttccctcaactgaacaaggcctgaaactctggcccacactcagttccatcaccactccagccacccccaccatatatagggccttgtttagacgcgaaaagattttggatttcgctactgtagcactttcgtttgtttgtggcaaatattatttaattatggactaactaggatcaaaagattcgtcttgtgatttacaggtaaactgtgcaattagtttttatttttgtttatatttaatgctttatgcaagtgatgaaagattcgatgtgacggaaaatcttgaaaactttttgttttttggggtgaagtaaacaaagcctaggtcttgtttagattcaaaaagtttttagattttaatactatagtatttttgtttttatttgacaaacgttatctaattatagagtaactagacttaaaagattcgtctcatgatttacagataaactgtgtaattaatttttgtttttatttattttaatatttaatacatgtggtgtaaaatttaatgtgacgaagaattttattttttttagtttttgggtaaactaaggccacagccgggtcatgtggcagagacaggggtggaggggccaaaggccgaaagctgccaaccctcgcctcgcgggtgaggagcgaaaattcgaatccataccctcccgctcccgctccctcgaacttttgggtttcgttttccctccgccccccgcccgaccgccgcgtccgctctgccctgttttcacgttcgatccccttcgattcgatttctacacccccagagtccagactccagagctctcactctcctgccaaaccccctcgtctcgcccctgccatggcaccgagctccccgtcccccgccgcgcccacgcgtgtctccggccggaagcgtgccgccaaggcagaggagatccaggaggaggaggttgtggtggcgtcctccgccaagcgcagccgcaaggcgccgtcttccggcaagaagcccaagccgacgcccaagcaggccaaaccggccaaggcggcgaggaagaagaagggggaggccgagaggaaggagcccgtggaggacgacgtgtgtgccgaggagcccgatgaggaggagctggccatgggcgaggaggaggcggaggcggcggccgatgagcaggccatgcaggaggaggtggccgcggtcgtggccgggtcgcccgggaagaagagggtggggagaaggagcgccgccgctggcggcgaccacgagccggagttcgtcggcaacgccgttcccgcggccgaggcgcgcagcaactggcctaagcgctacgagcgcagcactgccgcaaagaagtattttttccctccctactctgctttgcttttgattcgaccccagatgtttgcttccctgttgtgacttgtgagctgagcaatccctgtttgttgattcatggcttgtgcagaccggaggaggacgaagagctcaatgccaagtgccactaccggagcgccaaggtggacaacgtcgtctactgcctcggggatgacgtctatgtcaaggtccttgttcattgctttcattgccttctttatttgccatgatgctgttgctgctctcgtttatgctctgctcatgtttttgttaaggaaggacttgtttgatttttattgtccatttccaatgacgagttgtgcgtatgatcagcagtacatggtggcacgctggaagtctgtatggacaaaatactgtcttggtagcatgtttggcttcgaccaggaccttgcttaggaccttagtagctgcttgggtgctttttgcagcaagcttggcaatgatgaccaagtttggccgcttattagtttagttgtttggttgttttttcatctaagtgtaagttatgctctgtgacggtataattgttactgtgatcatataattgtcatggaaggaagcattgaactttaaaatcaagtcctagtgatgtgtgtttaacaagtggtttatggtcaattctatcttaattttggtggcttggtcattctggaatcatcacaatcgctccgtgtttgatgggattacccctagcctgaatggtgttttgtcgctcattaaagaggagatacttctatggagtctggttggggctagaggaatttctcatctcctctctctagtgacaagtgcaaactaggactctttctcggtcgaggtcaagcgttttttgatgtaataggcgagcagtggtttcttgagtgaggtgcggtgtgttgttgttttaggttatggggttttacacccctttcttcttaatatataaaacaagtggtttatggtattacttcctctggtcatgagtagaacaagatttggtcaaaccttcaaaactacaaacatcaataagtattccacatacttgcaaatctcttatatcggaagggttataatattatattctaaaagaaattagtggtcaaagatatgcatggaagattgcaaggtcaaatatcaaatgtgtgaagtatctgtgagagggagtataacataaggggtgctctaaatgtctgtctctacacaatgctgtgtttggtgtatatcctgctcctaaaagttggatccttttgattctgttgaaaatgaactgttcaacaatttcaatgctactaaatgttctaatgtttttgaggaaaaagtgttctaatgttaagaggatgttatttttaataacaaaaatgctgtttaaccctgcatctattttgcatgtgcggttgtgctagtgattgcttacatcatgttatgatctctgacattatttgaaaactttcttgtcttatttgcctgtctatgagagcctgagagggaagtattgtttgtctcttaaactttactttcatgaaagttcttattaattcaactgtacataaatactgatgatgcaatgaacaagagtgctcaaactaatggttgtgtacaataccactggatgattttgctctcacatcaaatctttttatatgttctttaataatagttagttagttactgaccttaagtttatgattgctttttgcatattttaggctggagaaaatgaggcagattacattggccgcattactgaattttttgaagggactgatcggtgtcactattttacttgccgttggttcttccgtgcagaggatacggtgcgtattgagctttgtgtcatttctaatcattcatgtcaagaagtagcataaaactgaaccctatcagtgcaggttatcaattctttggtgtccattaatgttgatggccacaagcatgaccctagacgtgtttttctttctgaggaaaagaatgacaatgtgcttgattgcatcatctccaaggtcaagatagtccatgtggatccaaatgtaagtcccctgatgagagctttatggttttgctatgcacataatgtttctcactctaactgttttttttgccttagatggatccaaaagccaaggctcagctgatagagcattgtgacctatactatgacatgtcgtactctgttgcatattctacatttgctaatatctcatcaggtaattgcttctacatcatccttttttggttgactagctgaatgcaatttacttgctttgctaaattagtgcaacgatactactcagggggtgtttggatgcatggactaaagtttaacagatgtcacatcaaatgaattaattaagtctaattaatctatcattagcaaatgtttactgtagcaccacattgtcaaatcatggactaattaagcttaaaaaattcatctcgcaaattagtcgcaatctgtgcaattagttatttttttagtctattggtttggtcatgtccaaaggagaccttatgaggcatagtcaaggttcagctaggcgctaggcgtaatcggggcgctgacccattgcctagcgcctagtcgggagtactcggtcctaggcgctcctaggcgttttcctaggcgttttggcaatataagccataaattatatatattatatatatatatttatatataactactatatatgagttacaactaatgtgcatgctactgaacaaagagcaaagagcaaagaggggagatgagcaggggaggagctgggagggaagggagctcaccttggggacttggaggagcaggggaggagcaggaccgacggaggaggagcaggaccagcggggggcgcctcggggattagcaggggaggagattggaggagcaggggaggagaagatgaggagcagaggaggagcaggacctgcagggaggtcgcccggcgacgaggaccggcggcagggacgaccaaatctgactcggggacgagtgaatgacgccgcgctcccttctattcctcccgcgccttcgtttcatggccgcgcgggaaatcctcccgctctccgatttagcgcgctaaattggccgcgcttgcgcccgcccagcgccgactccgcgccgcccagcgcctcgaagcgcgactatggccatagtcgaggcgacgggcttcgcctagcgcctaatcgccgcctactcgacgcctagccgaaccttgggcatagtgcattgtggagtcctaagtcgagatatcaatgtgaggagaggtagaggaagactgaagctgacatggggggaggcaataaaaagacatttaaagggttggaatatacctagagatctttgtttagataggagtgcttggaaagcagctatcgatgtccctaaaaaagatatttattcattcaaaagctattctgcaaaaacaattttgaaaagtaaaagctcaaacaacatgcctgtactccatcctaggtttattgggttaactttgattagtgcatgcagtgttgaaatataagtgaattacccacctttgcctaacaggtcaaacttttggtttgaattggttggtgcatgcaactcaatactcaatatggtattagtgctagaggtgagaagtctcgagtttgaatcttggctagtgcaattaaataaaataaatatagttgacctctatttccataatatttgaggcatgagtgactgagcctgccagggagggagcagtgttttctgatcgtccgattaatcgcgattaatcatccttatcggtctgtagcacttgattagggcctccgattcgattagagcgattaaaaacctgatcttccgattaatcgtcgattaatcatgattaatcgtcttgattagggtctgtagcacttgattaggcttttggcctgggatatatttaactgggtcaggcccattagggttttccttataacttcacccccactctcttctcagtcctcactcccactccagccgtcagctactgagttgctgctcctgctcgtgctgcttgctgcttcctcctccctcttccctgctgcctggtgcttcctcctccctcttccctgttgcctgcttcttcctccccattccagctccaatccaagtagcccgctactgcttgcttcctcctcactcttccctgctgcctgcttcttcctcccccttgaccttgatgcttgatgtccatatataaatatatagagtcaaatctcacaggtaagtagccaactaactagaaatatagtcttgatgcttgatgtgtactatataaatattgggagggagagtgttgaagtataaatgagctgtccacctttggcaaaagtggtgggatcacggcctgatcttgtgccaaaattaacactatgttgtaatggattgaaatgagctccaacatggctcatgatgcctaatagaaccattgtgtgcgacggggaagactttcagcatgtgatatattcagcgtgaatcatggcctgatattgcgtcaaagatgatcacccaaccgtatgaatgatgcattgctggttggtcgccatcctttgtgactttcttgtggaagtagagtgccattgccttcaactctctgctccttgcttcatttgcctttctatgtctggcttttgcaagcctgcccaataatcaagaaaggagcacatcatatagataatcttagagggggatttggttcttttgtcctcaaaacaaacaacatttcttgtgcaccatattgcttgacacagctgccagcctcactgcatataccagtttaccattcggtaaacaaagcttgatccaaacccaaaactgatcattattacaaggtttgcaactgactccaagggcacagcaatcagaatcaaaatgtatttcactgtcatccatccatccaacaaagagatgttccactgattccttttctgtttaaaaggcatatactgtatttcgcttcctttccaatttctcctcgtgaggttgtccttagtaaggatagtattttgaagaagccacacaaatattttaattttcagagggattttggattgccaaatatgtttaaaattttgaccttgatcattttaacataaatgtttatacactgatttgttatctacttctattttacgtgagggggagcttccatgtgataggtattaaatataactgaattgcgcaattccttatcagcttaggcttgtgagtgcaatggttggtgtatgtagctcaataactaaaactggtttgaacagtctacaatgattaactttgatactgcctctgtcccaaaatagaagtcagcttttcttaactttcactaactatatataaaaaatattaatatttataatacataattagtatcattagatagatcgttaaatatttggagatataaatgttgcacgtattttctacaaatctagtcaaacttgagaaagtacttgttaaaagtttatgtttttttacaaaccctgacacttgttttttactagaaaatgggcagtcaggtagtgaaaccgcttcgggtatttcttctgatgatgtggatctggaggcgccatctagtatgccagagaggacagcaacccttcttgatctgtattctggctgtgggggcatgtccactggtctttgcttgggtgcagctctttctggcttgaaacttgaaactgtaatcttctacctatttatctgttggatagaatgtgttcatggtctcagcactaattctattgttctggctatgatttgcagcgatgggctgttgatcttaacagttttgcgtgccaaagtttgaagtacaatcatccccagactgaagtatggatagtaaactgcatcttggatattccatctgttttgtccagctgctctcacaaagttcctttggatctttgaatgtaggtgcgaaatgagaaagccgatgagtttcttgctctcctcaaggaatgggcagtcctatgtgagaaatatgtccatcaagatgtggattcgaatttagcaggttcagaggatcaagaggatgaaggcagccctcttgacaaggacgaatttgttgtagagaagcttattggaatatgctatggtggtagtggaaggaaagatggcatctattttaaggtacttaacgttgtctgttcatctgtacttgataccaagaaaaaaagttcaattactatggcaatatagaaaaaactaagcttttcaagcaatggatatttctgtgtgttttgttgtaatgctagatttctgcaggtccagtgggaaggatatggtcctgaagaggatacatgggaaccgattgataacctgaggttcgtatttggtatgtcatctgcttgttgccttgtacatctgtttgcactctaatccttgtttcacaaaccagtgactgcccgctgaaaattagagagtttgtacaagaagggcacagaagaagaattctcccgctgcctgtgagtatttagttgggtgtggttttcctccctgtttgtttagttccccattttcatttggtgatatctacctaatctattctttcaaaagggtgatgttgatgtcatatgtggaggtccaccatgtcaaggtatcagtgggtttaatcggttcagaaaccgtgatgagccacttaaagatgagaaaaacaagcaaatggtgactttcatggatattgtggcttacttgaagcccaagtatgttctcatggaaaatgttgtagacatactcaaatttgctgatggctacctaggaaaatatgctttgagctgcctagttgctatgaagtaccaagcacgccttggaatgatggtggcaggctgctatggtctgccacagttcaggatgcgtgtgttcctctggggtgctctttcttccatggtttgtttcttaccttgatgttttatatgctttgttacatttatattgcactgttgactgctggctaatcagttgtatttgacaatgtaggtgctccctaagtatcctctgcctacatatgatgttgtagtacgtggaaacaccccaaatgccttttcggtaagtgcaatcactactttgaaatcctttggaatgtgtaaaatctgttgaccaactgaattgtttacagcaatgtatggttgcatatgatgagaaacaaaaaccacacctgaagaaagctttgcttcttggtgatgcaatttcagatttaccaaaggcaagtgttttctcaagttcatacatttctcaatgtgcatgcaatcttactcttctctgcaggttgaaaaccatcaacctaaagaggtaatggagtatggtggttcccccaagacggaattccagcgttacattcgacttagtcgtaaaggtaagggccagtgagctttactggttgactttctccatgaatttcagaagaaccaccttttttttcttggtcctttgctaaattgctactactgcagcaagttcactctgttttattctttcagacatgttggattggtcctttggtgaggaggctggtccagacaaaggcaagctcttggatcaccagcccttacggcttaataacgatgattatgagcgggttcaacaaattcctgtcaagaaggttggtggcttgatagtgtttgtgccttcctttgttgttcctgaaataatcacactctttccaatgacagggagccaacttccgtgacctaaagggtgtcaaggttggagcaaacaatattgttgagtgggatccagaaatcgagcgtgtgaaactttcatctgggaaaccactggtatgtgttatttcgtgctgttgtttccataaagtgcaacatttatgttacatattcagactcatatctgatgagatgctgcaactactgtaagattcatggttaagacatgataagattttgcacaaatctttgttatctaggttcctgactatgcgatgtcattcatcaagggtaaatcactcaagtaagttacaaaatggtcccgctttctttctttctttgttttttttgaaaaaaataggttattggttacttgtccttacatatgttgttgtaggccatttggacgcctgtggtgggatgagacagttcctacagttgtaaccagagcagagcctcacaaccaggtcagcttcagtacaaactacccctttatgataatccctgcaactgtctttactgctagtgttgtctgcatatgatcctgatcgaatatgttgttatcagattatattgcacccctttatgataatccctgcaactgtctttactgctagtgttgtctgcatatgatcctgatggaatatgttgttgtcagattatattgcatccgactcaagcaagagtcctgactatccgggagaacgcaaggttgcagggcttccctgattactaccgattgtttggccccatcaaggagaagtaagttcctcttttcagtttgcctgtacgtgatctagtcactcttgaaagttgtcagcagtaaaccattgaacagtcagtttcagctcttgaaatcagaagcaggattatgctgcattgtaatccttgcctctgaacatgcgtgctttctctgatggtgataggtatattcaagttggaaatgcagtagctgtccctgttgcccgggcactgggctactgtctggggcaagcctacctgggcgaatctgaggggagtcaccctctgtaccagctgcctccaagtttcaccgctttggggcgaactgcggtgcaggcgagggcctctcctgttggcactcctgtaggggaggttgttgagcagtaa

SEQ ID NO: 795 - DNA, 12329 bp, Sorghum bicolor
  source 1..12329: mol_type = genomic DNA
gcttgggatggaagtaacaactctggaggcaagaagcgccaacgatttcgaaagaagtcaaagtgaagatgctctaggatttacattttttccatagggatatagctttctatgttcaaggacttgtgaacatagtaaaggtgtaggcatagaaagttgccgtgttacatagttgtatttcagcagccggtaccctaaagtaaattgcccggtcctgctgtatatattgccaatcatggataggagacatgaatgacatcataatggactaaaggagacatgttatgtctgttccttgatattagtagtattattctggaaacagaattgcatgtcatacaaatcttgaaagcttgtggtaactaaggttaggtagaatagccaggggcataatagctaattttaactcttctctcccctccactcgtgaaaactattatttagatagtcatagtgtctaagagctaattaccacaattacaaaatgtcttctagcaaaaacaaacaatattattaagtaaatgtttcttaacaaaaaactaacattgaatgataaccaccattgaacaatgtcctataacaaatttacccttaacaatttggcactcctcccaatggcccctgagtacagtgtgttcgtatttggttgcttttatgcaggctttacgtagtgcttaaagcaggtacaatgtcgcttcatagcgagtacgttagatttagtcatatgatacaatgcagatttacataagctgacgtgcacataaaaaaataaaacattatcatttacatacctctagtagaaatatgagacctcaatgaatatgattatatgcaacaaaatgtacacaatcacacataattttatcaaatacgctttgcttgtatagaacaaccaaatatcaagacactatgtacttttagcttgacttagatttatacttataagatctaatgcaagctaaagctaataaaagattagaagcaaccaatcagatttcaagtgaatggacgcagagcatcccgttacaaacagaagagcatcggttctgttgaggaaaactaaaacacaagaacggaggagaggttcatcacgacggtattaggctgaggcgaaaccatttgccaacaaagacatttcgcacgaacgtgccacctgacattatgggtccacgcgccagccgcccatcagcgggaacccgtccgtaccgcctccgcaacggtaacgatagcggtcgcctgctccccagaacgcaaaaacaccccgccgccgccccggggcccctccaaggctccaacgaacgaacacaggccacggcgccaccgccacccacacccaccgcctcacgcacttcgccttctcctcgcagctcagctcccctctctccccccattccgccgtgccgtgcctctcgcctcccggcactgccgatttatataccaaccaccgcgccatgcgctccccaccgccaccgccacagccactccacccgcaccgaaccaatggcggccgacccgccgcccccacctcctccggcgcagctcccgcctcctcgccgcccgcacaagcagcttcagccgcgggggtactgatcgactctgatctcgcgctgtgcggccgtgtggcgggggcctgatgagctgatgtgtaggttccgctcgcgtcgcgtgtgcaggtaccaggtggaggtgttcgccgcggcgctgcgcgggaacaccatcgcggtgctagacacaggctccgggaagaccatggtcgccatcatgctcgcgcgggagcacgtcctccgtgcgcgcgctggggagacgccacgccggatcgtggtgttcctcgcgcccactgtacatctcgtccaccaggttggcctccggtggcccgttttgtcttctccacgcgggaatgtggtgggtagaggctgtgtttttgatgggggaagcggtgcctttctgtgtttgtgctgtagcaattcgaggtgattcgggagtacacagacctcgacgcggtggagtgccatggggcatcgggggttggcgactggaacgccaagcgctggaaggaagcaattggcagtaaggaggtaagcgccagggttcactgaagcctgccctatgcttgacacagtaattgagcaattgtgatgcactctgagatttactaccaacttacttgactaatggcctggaacatcaagcgtcctgtagtgttgataaccactgccgtcagtcgtggtcgtcctgagttgaatgtagattgaggttattttcttcataaatgcaggagttcttgactaaaattattcttcaataatagctatatacatatgaaatattctccttgtttccgttgctatacggatacttctctacattcacaaaatctcataatccttgtaaatatgccactgtgatgaacttatctgaacttatatggctttttaattttattttcttctcttggatttcatagtcattcatacgattgtgaaatatgtaagcaatgactcttttccttttttttcctctcagattgttgttatgacaccacagatattattggacgctctcaggcatgcttttctaacaatgtgtgtgatgagcttgctaatatttgatgaatgccatcgtgcttgtgggaaccatccatactcaagaataatgaaggtaacacgatttgaagatcgtttctttggtttgacttgtatttccgataggctttgttccatactctcttgcagtcttgtatagtacatggattgcttaggccttaggatcacgttttctaaacaagtgtcatgcaaaagttctaatgtctctaacccggcttgtgtttaaaggagttttacattgattctgagtggaggccagctatatttggaatgacggcatctccagtttctaaaaggggtaggagtttctgtttatgacattcatgtgtaatttctcttttgtcaatcgttccagcaattattctttattgctattttaattatcatgttgtatgactgtaattgtcttcctttttttttgtcatactccatgaaaaactctttttgataaattttatggtgcattgatactccattttggtgtataacactttttttttctgatatcgactcatgttgttttgtgcatcataagacaatgcattttgggagtgtggtgctctcttgtactaaatactaatgctgctctacttctcagaagtataaatttctaggttatctagcttacatgatttgttgcagctttaatttttttaatgattttgtgcatctaatttgattcttgggtgcacattgcacttccttgttaattgtttttcattgttactattcatcctactggaagctacatatatgactaatttactgagtcaaagttgtttctgatctatgactgtttcattaggcatatgtttttcttactaattatggtaggttcacatttttggatccttagctattatttgggtagggtcatgcagagtgtagcacaggagccctattagaatatattgtcaccttggattcacattcctaccattaaatgtgccatgctattctattttgcatttagtatttatttctaaaaccttatatttttacaggggcttctactatagaagattgtgaagcacagattgctcaacttgagctagtattgaatgccaaggttctttctctcttgctgccaaaatttccttaaattttttattgagttcttttaggaaacccaagtttgcagcagcaaactgatttaaatatcttacacattatcccaggtatatattgttgaagataggaatgaacttgagagcttttcaactggtgcgaaaattgtgaataaatactatgatccttacttatttgatttggatgatctggaatcaaagttacagatgctgttcgaggaggtgatttaaccaaccaactatatttcttctgattcactagaaaaatgtgcttttttagtagccacagtctcgatacctagtatctttttctgcttgtacttacgcatatgtttatatatctaaacattgtactgttgggcagtttgatggtttgttggttagtctacaagaatcatctcctaataaatttgaagacaccgatagtatattggagatgtcgagaaagagcttgtccaggtaccatgggaagatattgtacggactaaatactcttggtccaattgttaccttggaggtattattttattgaagcagcaagtatttcttttttttttctgaagggttataatgtccattacattctatttattgatattgattagtagctgcataagttcgtgtgtccttaatgactcctacatttctacacatttgttaactaatgccattgactcttgctgagacagggaatatattggattaagaaattggcaagcataatttaataggtcacctttgttataggaaacacatttgagataccctttctcttgtctcacaaaagaaaaaatggctcaactcagtgaatacatttgccctcctttatgaaaattttctgtttctttccctgccagtcttaataatgtagcacttgcactgcaaaccatattacagtaccataccatttgtattagaaaatatgtggtcatgatcctatgttccgaacattcacctgtagctttcatttctttagattgttttttcagtttgaaggattatgttcttcgttcctagaaaatcatacatgtatttatatagcaatcttattaaccagagtaactaattgtacaatttgaatgcttatatgctaactctttattacatttctctgacaggtggtgaaaatatataatgaaagcattaataccgtaggtgattctgaagattgtctattttctaaagcaagcctcaacttacaggtgtcctatttcaaagaagctttatttttgattgaagaatttttgccacagggtatgatgcactattttacttaactcttactatactgtcaccagctttgaacctacagcttttatgcatcaatatttactttctaattcttatggcatcattctataataggttatggggagctgatgaaatcagaatctggttctgcggaactaactaagaggggatatgtttcttctaaagtgcagacactgatcaacattttcaaatcatttgggtaataccttaatccacttaagatgtttatttattcctttgtttagtcttctgttcgtgcaaacatacatttacatgtgttttctccacagctcgtcagaggaagtgctttgcatgatttttgtagaaagaattatgacagccaaagctgttgaaaggtttatgagaggaaatgtgaacttctctcgtttttcaatttcatacttgactggagggagtacatcaaaagattctttgagcccagcagtacagagatttactttggatttgttccgagctgggaaggtattatgttttacatgtgaaatttgattggaatattcaaatgatatactaacccttatttcaatttataggtgaatttgctttttacaacagatgtcactgaagagggtattgatgtacctaactgttcctgtgtgatacgctttgacttacccagaactgtttgtagctatgtccagtctcgtgggcgtgccagaagaagcagttcaagttatgttcttatgattgaaaggtacaaagtttgctatatttaatcaattttattttgatatggactgtttaactataaaaaagtttatatggtcaccaatattttgtcccgttccaagttacacctattcttaaaccttttcttatatgctttgtctggaactttcaggggtaacttggtgcagcaggaacacatatttcgtataatacgaactgaatactatgttaaaaccttcgcactgcataaacagccaaatactccatcacttgatttgcctctccaagagaagtacatgtaccatgttgaatcaacaggagcaactatcactgcagaatgctgtgtcaatctaatttataaatattgtgagaagcttcctaaagataggtatgcttgtgcttttaatctgcatatgtgttcgttgatctgcatttcaacatatgtgtgattgctattcttaaactttcaattggatttgttcctgctatgggtagtatttgcatgtgggctgaaaagttgatcaaacttaaatgtcacacataatggaataactacacctcctaccccatgaacttgctgtataaaaacacgatagcactcctctccaggtattacttgccaaagccttgctttgaggtgggtctcaaagatgggtcatatcaatgtgccttgacaatgccccccaatgctgcatttcgaagtatagttggtcctccaagcagtacatgtaatttagccaagcagcttgtatgcctcgaggcatgcaagaaactgcacgagctgggagaactcgatgatcatctagtacccttgactgaagagcctatggatatcgatacagacacaacagataaaaaatgtgtttctggaccaggtatggttctaatgttttgcaagtgttgcttcgtgcttacatcaatgtttcattgagaggaacacctcttcatatatttatctctgtttcaacaataaaatactgtacagtgagtgagtctgtttatagtggttgtgactcagaacgggcatgaaacttctgcataccaggatagaacttgatgagctagtggtggttgaatctgtttgttgccttgcatgctgcatcatatttacttgtacagaaactctcttcgtataagttgttatctttgtggacttgtttattaagaaaatgtctcatttgttatttttgacatggattgagcaatgcactgaatacttagtttacaaatggaagttgacagtagcattcccatgaagtattagcaacagctatgagtgcttctccttccgaagaagattttatattttttccattgccctttcaccattttggcaggaacaactaaacgaaaggagcttcatggaataataaatgttcatggtctatctggaaactggatccatgaaagtgaaactgtcattctgaattcttacacatttgattttcgttgtgatcaagaaggtgaaacttttgctgggttcgttctcttaatggaatcagtacttgatgatgacgtggcacattcagaaatagatctcttccttatacctaataaaatggtgtacaccgccataactccttgtggaaaaattcaactgaacaaagagcaggttgttcaagaaaccctgttgctagaattcttttaagtttaccaatggcttacttttcctagttttcttcagctgcgtaaaggaaaattattccaagaattcttcttcaatggtatatttggtagattatttcatggttcccgaacgagtggactgcaaagggaatttattttcagaaaaggtcatgaaatacaatggggctcagacaacatgtacttacttttgcctttgaggaactcttcacatatacagcatgatctgaacatatactgggaagccgttgagtcttgctctggtgcagtggagcagttgagaaatttgtatctagaagatggaaatcttaaccatgaaaacttatgttcacataaaagaagcaacaagggagaagacatcattcatctggccaataaatctcttcatttttccacagtcaaagattcagttgtgctgtctcttcatactgggaggatctattctgtccttgacttgattttagatacaactgcagacgactcattcgatgagatgtataatgggaaagcttcaccattttcttcattcgtggactattaccatcaaaagtaggtgctcatttttaattttctcaattcaagaattgatccactctgttatgcttgctcactaatttctctgttctcacctatatgtaggtatggtattgttattcaacatccagggcaacctttgttgctgttaaagcaaagtcacaatgcacacaatttacttttttcaaaaatgaaataccaaggtactttaacctcaatgtagtagcattctttcccttctctgttgtataatttgagactagtaattgtgttactttggctctgcttttacatgacactatccaatttatggcagatggttcaactggcaatcctctgctcgtggaaaaagagcaaattcatgcccgagtcccacctgaactactcatccacattgatgtcacaactgatattctcaaatcattttacttgctcccttctgtaatgcatcgggttcagtctttaatgttagccagccagcttcgcagagacattagttacactcaacgcataccaagttctctggtttgttctctcttatgatattacgtattgttttatttgttaaggatagtaatgctaatgcatatatcagaaatctgacttctcttcatgctagattttggaagctataacaactttaaggtgctgcgagaccttttctctggagcggttggagttattaggagactcagtactgaaatatgtaataggatgtgacctgttcctaagatatccaatgaaacatgaaggccatctctctgatatgagatccaaggcggtatgcaatgcgacactgcataaacatggaatatgccgatccctgcaggtagatgttttcaagcctaagtccatttgtgtgatgtcattttgctgaagttcataattggatctgtcaatattctttacatcataattcaaccagttttgtgtgacagtgacaccaattattccttgtcatcatttgacaaaagttgacattttccagaaggtttagtccagaaggaataagatgcatgctattcatgctacaatggatagacgaatccagttacactttttcctgttctgtgctacccatctgtagtttcatatcttttttgagaatgtgcatagcatgtgtttcattaagaagaagttagaaggtttacacgcccaaaatcacatcacggcgaggtgccatgaacgaaggggtagaacacgaacacaaggcgccacagggtggtgaagcacacgctgttgtaactaagaaactaaaggtgcgacctaagagcttgcgacgttgagggaacccgtagtttcatataataagcctaatcactggtgtcatcttttctttgaagtatttcctttttattagtttttttatttaatgtatatctattaatgctttcagggttatatacgtgatactgcattcgaccctcgtcgttgggttgctcctggacagatatcattgcgcccttttccttgtaactgtggaatcgaaactgcatttgttccttttactggagaatatatcagtgatgatccatcttttattgtgggaaaaccatgtgacagaggccacagatggatgtgctcaaaaacagtatctgattgtgttgaagcactagttggagcatattatgttggtggtggcatcactgctgcaatttgggttatgaggtggtttggtattgatgtcagatgtgatatggaactagtgcagaaagcaaaatataattctaatgcatctcaattgtgctatttatcaaaattaaaagtttttgaggaactggaagcaaaactgaagtacaacttctcggtgaaaggccttctgcttgaagccgtatcacatccatctctacaggaattaggagttgactattgttaccaggtcagtgaaacagagttttagtacattagattattgcatttaaggcacgttgatatacatatcttaatttctgatttgtaacagcggctggaatttcttggtgattctgtgctggatctattaatcacacaacatctctatgctacccacactgatgttgatcctggagaattaacagacttgcgttcagctttggttagtaatgagaattttgcacaagcagttgtaagaaacaatattcatagtcatctacagcatggatctggaatacttttggagcaagtaacagaatatgtcaggtccagtttggagtaccatggtaaagagaatgaattcgttcaacaagctacatttaaagcacctaaggttagaaaacttagttctacttctgtttgtggcttaacagcttattttactttattgtctttttatatctttgagggaataacatggagctctccttcatattcccaattaataattgtgctttcattgtttgtgcaatgtttatctcttttactcagcaaagtagaactttccaaggccaacagtatggacacaaattagaaagctaattttaatttccttgaacaggttcttggagacatcatggaaagtattactggtgcaatatttatagatgtaaattttaacgttgatctggtttggaagattgttgaaccgttactttctccaatgattacccctgataagcttgcattgccaccttatcgggagttgctggagttatgtagtcaccttggttgcttcataaagtcaaaatgtactagtaaaggagaagaattaattatagagatgacggtgcagctgcgagatgaactgctgatagcacaaggacatgacagaaataggaaaagtgcaaaggcaaaggcagcagcccgaattttggtcgacctgaaggtatatcttttcaaatagaaacaaaaatatcaagaaattgtctagttcaaggggttgggcaggtccattgtgatgctaatgggtaacccaactacacaccttgggtgtaactttctattctattgtaatggttgctttggcagtagatgctactccttcctgtcggaaatccatgatggttccatccggtggcttgaactataggcaaaatttgcctctcgagtgtcatgtattttcagaaggatggagtatgttttgttgactattctagaactggttttaatttttgttctgaatgcagaaacggggtctttctcttaaacaatgtttctctaaggctaagcaattggatattgtctcttcagaactgcaatcagaattgataagtgtaagcttctagagagttttccacaaaatggcacatcaaagtagtgaactcaattctgatgctctgagtaatgaatattatcgcatctatgtagttggaatcacgatatgattgtcctgacgtgaatggcagtcttagcctagaaggtctttcctcggtgagagcagcaggtaatgccctgttttggttattactccctctgttccaaattatagttcactttagttttatacttttatgtcctaagttaaacttttctaactttgaccaagtttatagaaaaatacatgaacattacaacatcaagttagtttcattaaattttccatgaaatatattttcatagtacatttacttgaacttgaggtgttgatatatttttattaaaacttcttcaaagttagggaagtttgaattaggacaaagctagagtgaactatgatttggaatgaatggagtatatggtactcactggccaggctatcaaataggaaatattagtcattagattttttttgaagcaaattagtaattagatttattctgtatagttctagcagccacaaaatacttagcagtactcagatgccatggcctttcatatgctttcagttgttcttcctctcaaaatggataaaggtggacctcggactgcactttttaggctatgcaagagattgcagtggccaattccagaatttgaatttgtggaacaaaggttcaggtatgtcaaataatacccaaacattatttttcttgtaaaagaatgtgaaacttcattcacaagagctttgatgattcttattcatttggtcttcaggaacttttttttatctttctatgtcttttacatttaagaatcatggttcaaacaagactaccttcagaaaatcagctggtttagtgttcatatatatgatgctagtttttttttaattcatgaagcctaaacaatcatctgcaaaattatatatctgatcaacaattttttctggatgaatattttctcttagatgatttaagcaacatttggtttatttttaacagtgtttgttttattttatttttgctgcaacaggactcctattgttctggatggggttacaaccacaaacttcaatagcttcgtttcaactattaccttgcacatacctgatgtgactgtcattacacttcaaggtgagcgccggactgacaagaagagttctcaggattcagcgtctctggtaatgcttcagaaacttgaagaactcaaggtctgcatatgcaagcagacacagcaaagcaacatggataataataccagttaa

SEQ ID NO: 796 - DNA, 10612 bp, Sorghum bicolor
  source 1..10612: mol_type = genomic DNA
acagaaaaaagtaaaacctaaatagtatctaacataggcctgtttgaatccgctactataaattttagagctaaaattcccagaaaaaggtagtccaaaattagttctaaacttagcacacctcatattagagctttatatcttaaaagtaagctaaagtactctaaaatttttagtgctctaggatttagaaaatgcgatccaaacatgccctcattatatgtttttactaagtacgagatcacgaataggatatagaaggtgcaatgccatttgtaagtaaaaaaccgaaaaaagctatcaaacctaggtgaaaaatgacaacacaatgctatagataattagcatctaattataaattaattagatttaaaatatttattttgtaaattactttctacctgtgttttaatttttataaataatttatatttaatattcaatgtatttctgaatatttgatgtgacaactttacataagccacccaaacgcggacatgtgagctcagagttttctttttcctttgtttttaccccttcggtttccttttgtctctgcggttctccctctacctctccggctctccctcttcagtcagcaataaaaggcaaccttcgtcagccaaggacacctcgctcgcccctgcctgccgtactctccggccgttcccgccagagccgcctcgcgcctcccgtactcctccggccgtccccgacggagctgcctcgactgtcccccgccgcgctagcaaccacattttttggacttccccgcttgactttgggcctcccctgcccccaaccccggcaaacagccgtcctccgccacccgcggccggcgacgccccgccttgccgttccgccttgccggaggcggagattccgcgacggaagccgacgcgcggcagtcgattccgcgatggaggcagccgccgccgccgatggtaaccaccagctcttttagtggggttttttctgggttttgtgggttttctgtttattgcagtccctggtgtccggccctcgattgggccatgcagattagggtgtgatcaggctgggccatgtaatgcatgctcgattccactgcttcgatcgcgctaatgcgggtaaactggaggtttgggcaacggttccggatgaagtggtacttggatcggggctttaggggggttcgtgccttcggttgagggttttgggagggtttggcagctaaagcggctgggtattagctatgccgttcgtcatgagacatttttttattccctccttacctgtgtactttgtgggttatgaacccttatgcattttctactagtgatggatttctgttgatctcacttgataaatcatttacattagcaggaggcatgacctcctttaccctgtgtactttgtgggttaataacccctatcactctatgcatttgattttgggtctactggtaatgggtttctgttgaactcacttgataaatcattgttgcataagcaggaggcatgaatcttttgaagaggccatccaactcatcgcctccagaagacgaaacagacaagcataaacggcagaagagggaatgccaggatttcacccccagaaggttctgcacatttgaccaaagaatttcactgttatacactcaggggtacagtgtatcatatgatggctgtgctttgtgatgttgaattgatcaggtaccagcttgatgtctatgaggttgctatgaggcagaacacaattgcgatgcttgacacgggagctgggaagacaatgattgctgtcatgctcatcaagcattttgggaagatcagcaaagcaaataatgatcgaaagctcatcatattccttgcaccaacagttcaactcgtcacacaggtggtttctaccaaagcctgatgattctaactgaaacgaaacaagtttgtgctgatattttctgtaacagcaatgcgaggttattaagagctacactgattttgaggtggagcattatcatggtgcaaagggtgttgatcaatggaaggctcatagctggcaacaacaattcttaaaatatcaggtcagtttcatttctatcttttttcaatcatattgattcctcattttttattctaaaggaaatgatcctcccaaatttgtggcagtgctgttctgcactcttctgttaattagattagatttgctgacagcaggtgttttagctcttcatttactctactttggttttaaagatcatgacatgtactgtatgacatgatatagttattctagcttatgtgcatattgagtttttttttgatctttttgctgcaaatttgatctataaagcctttttttggtctgtgtatccactcttatttttgcgcttagtaatttttgaagatatatgattgtgtggagcttccttcacagtacctttaataattttggtaacaaaaaattatgttcctagattaaacattaaagaaaattactgcagcaaagttgcagaatcctagtttgtgatgctccatttacttacttgacagcccctacaaaattgcaggttatggtcatgacaccacaggtgttgctagatgctttacgccaagctttcttgatcctggacatggttagtctcatgatatttgatgaatgccatcacgcaactggtaaccacccatatactaggataatgaaggtattctgaaaaaaaaaactttcttgtaatacttacaaagttacgaattactttccttttgtcttgctcgtttttaattagtagcttctgttattttgcccttttgaacaggagttctatcacggatcagagcataaaccaaatgtgttcggtatgacagcctctcctatcataagaaaaggcaagtattaatgataaaagtatatattgttcttttttgttgttatctttcagacatcacaaaattccctgatcaggcctgttgcagtggtgagagttgtctcactgagtcaccaggtcgtgggttcgaagcagcctctccgcagattttgcggggggaaggcttaccttggtctgccccctttaaactaacatctccaatggcaagctaatgatctttgtcagaaatgtaattcagagatgaaattgaatcttgatggcttgtaataacattattgagaaatatgatgattatgttggtggtggtttggctgtacgaaaatatcacaaatggtgacattttggccaagtgaaataaatagggctggttgtctatccatcaattaaatacaatgtcacacagttctcctatgtgttcaagaaaaaaaagtgaaaaatatagaattccatagaggaattccgagggtataatctttatttgtattccaccatatgttgctaattcttgcaattttgtttgtttcctaccatggattttgtaccttcaccatttaaatatttgcttttgttttgccattttaccttttcattttgcaggggtctcatctgatttggattgcgaaaatcagctatctgagctggaaaatattttagattccaaggtatgtccctttttatactactttgtttatttattatctatactgcgtgtgtgtataagcttcttagattatccaggacgcagtagctgtgtgattattccaatattccaatttatctatggaacctcacaggcatggccatattgaaatgtgcggtttacaactatacttgtttcatgctacaagatgaaaattgtttacttgcattcctatttagatctgtctttttaggtgaaatatgtccactatgcccttacatttcaggaaaatgccattaactgctcctgtttacattgtaacgcagatacacgctgtggtggatagagaagagatagaactttgtgttccttccgcaaaagaagtgaacagatactatgagccgagaactgtttcttttgaagatttaagtgaagaactggaaattttgtgttccaaggtttcatactctttaataattcctggctctgtcgttgaagtctttaccaaagcttttaagatcgatgtctaaaatcagcatctttttacgtgtgcagtatgatgggctgatcgtacaattgcataacagatcgaccaatcagtacaaagatgctgatgaaataacaaaagaatcacggagacgtctctcaaaatctttagcaaagatttgctattgccttgaagatgccggtcttctttgtgctagtgaggtattagttagattggttttaagctattaatgtttgcccttgttctttttgtcttgagtgttaattctttttggtcttttcctttaatttcacaattccatggtatttatttagataatttatttttctcttaggccactaaaatctgcattgaaagagggcagagaaaaggttggctgaaggggggcagtgacaccactgatcagcaaagtgatccaaatggaccaatcctatttgcagaaatttcaatgcttcatatgaagttctttcaggaagtgttggatataattgacaaacgcctccaacagcaacaaggtatgactgcagattaaactaattcaatggagtactaattgctaatatgtagcattgcaacgtcctatatattaagtatgatgcgtcagtgatgattccctgacatttcaggaattgatgcccttctgaactcagagagtggatgtgtggaagcagcaaagatgggctatatttcaccaaagctctatgagctcatgcgagtatttctttctttcaggtgaagtgatattttcgtaacttgacctgttcattttcaactatgtgtctttacactgacatgagatacatctgtgtctaacagtgactctgataacgtccgatgccttatttttgtggaccgaaagattagtgctagagtcattgagcggacaatgaagaaaataggccgactctcctgtttcagagtctcttttctaactggagggagttcttcagtggatgcactcacccctaaaatgcaaaaggatacgctggattcattccgctctggaaaggtacttaacatctcttaacatttgtgtaaattgaaacatagtgctcaacttctcatgatctgagatctgacgttgttttctttcccctgaaaataaaatgtaggtcaacttactgtttactacagatgttgcagaagagggtatacatattccagactgctcgtgtgtaataagatttgatttgccaaggactacccgcagctatgtgcaatcacgtggacgagcacgacagcgggactctcagtacatactaatgattgaaaagtaaaccctttactttgtagtgttgtctaaactctaaactacttatgcttgtgatggtactatgattgtcatgataataaaatggttacagaagtcatattgtcaatgttctttgcagggggaatgtgaaacaaagtgatttaatatctaggattatgagaagtaagacctcgatgactgagattgcttcaaaccgagagcctgaggattcacaccgcaatttcttccccattgaagaaataaatgaataccatataagcacaacaggagccaaaataactactgattctagcatcagtgttctcaaccagtactgtgacaagctcccgaaggacaagtatgttgactaaatttctcttttgtccttttacatggcctacacagattatatacatttagaaattctgccataccaagtttctgtttggtattttttatttcctgtgtagggttccaacctatttttctgactttcttgctcgtgttgaaggtactacaccccaagacccacgtttcagttcacccattatggtgatggttatgagtgtactgtaacactaccatccagtgccatgtttcaacttttggtaggtccaaaagcaagaaatatgcagaaagcaaagcagcttgtttgccttgatgcatgtaagaggctgcatcagctcggagcacttgatgaccatctttctccatcagttgaagagacgcctctggaaatttcaagcaagtctagtatctcaacatctggtgcaggtttaggtatatgattgttaattcctaaagagatatcatgtatcacatactccttatgttccaaattataggttattttaacattttctgagtcaaacttctccaactttgaccatgtttatagaaaaatacatcatctacaattctacatcatgaaattagttccattaaattcaccatgaaatatgtattgatagtgcattcatttggtttcaaaaaaatagatgttaatatatttttctaaaaatttggttaaagttagagaactttgaattaggacaaagctaaaatgacataattgagaatatgtggagttcttgtttgtagtcgatatacacaatgaatcttatttgtaatatttctttattgtttatttactaaatgataaaaacaataagtatctctttattgtttatttactaaatgataaaaaataataattatctctaatgacagtgttttatttcattctcaaaggtacaaccaaacggaaagagctacatggtacaaccaaagttctttctatgtctggctcttggggttcagataaaagtgtgactaaacttcaaggctacaagttaaattttgtttgtgatcaagttgatcaaaaatactgtgactttgtccttctaattgatacaagtatagcaaaagaagctgctactttaaatattgatttatatttgcatgacaagatggtaaaagcttcggtttctccttgtggacctcttgagttggatgctcgacaggtttgatcaactacattgtctatctactttgttttaaataatttttttttcttacctaaaatatttcttttggttctctcttagatggaaaaaacaaaattgtttcaagcacttctatttaacggtttgtttggaaaactgtttattggatcaaaagcatcaaaaaccccaagggagttcattctcaagaaagatgatgcatttctttggaataaagaaaatatgtatttgctattacctgtggattctactcaggattctcataaaagtgtttgcatcaactggagtatagttgatatagcggctacaactgttggactcatgagaagcatttattcagatggcaaacataacctaaaggataaacttaatcatgaaaaaaatgacgaaaattttattcgtttggccaacaagtcatgcaaagctgatgatcttaaaaatatggtggttttagcaattcatactggaaagatatatactgttcttaaggtatctgatttatgtgctaatagtaaatttgatggtacatctgacaagaaagaagcaaaattccagacatttgcagaatattttgagaagaagtatgctccattttttacatatttatatgcttatttaagaatacatatttaataaacactaaactaacacactttatttacaggtataatatatttctttgtcatcctttacaaccattgctagtgttgaaacccacccataatcctcacaatcttctttcctcaaagaatagagatgaaggtataatttataaacttgaactctgttttcctttttaactgtagccaagttgataattttgtataatgatacaaattgtttatgctttattgttttttgtaggcaatgttgtggaaaataaaaatagggcaaatagccttgttcacatgcctccagagttgctgattccccttgatttacctgttgatgttttgagagtattctatttgtttccatctctgatgcatcgtcttgaatcactaatgctagccagccaactaagaagtgaaattgcatacacagattctgatatatcgagcttcgtggtaaatttatatttcttgacataatattatgttattccttaaaatgtaatgtgacaatccatttccctacacttcctcagattttggaagctattacaacacttagatgctgcgaggacttctcaatggagcgtttagagttattgggggactctgttcttaagtatgcagtgagtgcccatcttttcatgacatttcttaataagcatgaggggcagttatcgtccagaaggcaagaaactatatgtaatgccacactttatagacttggtactgaacgcagaatacaggtaaattacatctcatcattggcaatatggacaaaatgctgcattttgcttcaaaaaatgagctataatgctattttaattaactctgttattggtggaatgccatccatagggttatatacgtgatgctgcatttgatcctcgtcgatggcttgctcctggacagctgtccagccgtccctgtccttgtgaatgcccagtaaaatctgaggttataactgaggatattcacagaattgatgacaaatctataattataggcaaggcgtgtgacaagggacacagatggatatgttctaaaaccatctctgattgtgttgaggctataattggggcctattatgtggaagggggattaaaagcagcttttgctgttctcaaatggttgcagattgagacacttgaggaagagcaaattatggaagccctatcaagtgcttcagtgcgaaattatcttccaaaagttgatgtagttgaatttcttgaagcaaaactaggctacacctttcaagtgaaaggtttgctaatagaggctctcacccacccatcacagcaagaatctggagcaacatactgctaccaggtattgttgatatttatcttaaacttagctagtttaaggctttttattctatttctcattttctctaacggaagacgttttactttcagcgcttggaattccttggtgatgcagtcttagatattttaataactcgccatttattccttagtcataaagacacagatgagggggagctgacagatttacggtctgcatcagtaaataatgagaattttgcacaagttgcggtaaagcacaatctccatcagtttctacaacattcttctgggttcctacaagaccaaattactgaatatgtgaatagtctggaaggttcatccatggacagaaccagccttttatccagtgggccatctagggggccaaaagtatgttttctcttcctctctgtataccagtgcatatgagattccagatcccatgaatgacatgtgctttcgtttaggagtagcatattagtgctatttgttgacatcctttacagcctgttgtacttctatggtagaaactagcatattttagcagctgcaacagcagctgtggctgcaaacaccaaatagattgctactcatgcagccacagcctaaaaaccacagccgataagccctaatgcaaaatgtgattggtaggtccaccatatggtaatccccttttttggctgaccccaaagatactgttgaaacacagtttttaaaaccttggttgaaacattgtttttatctagaatatgacatttcactttgtcttctttcacacaggttctaggtgatattgtagaaagtattgcaggtgctattcttattgacagcaaacttgatctggatttagtctggcgggttttcaaacctcttctttccccaattgtcacacctgagaatttggagttacccccattcagagaacttaatgagtggtgtgacaagaatgggtactttattggaattaaatgtgaaaatcgaggagacaaaacaacggctattcttagcttacaactcaaggacttgcttctggtgaggcaaggttgtgggaagaacaaaatagatgcaaaagcacatgcagcttccttattgctcagggatctagaggtacttccttttatgctccattttttttggtaattcatgctacatgcatgctggttgatttggggcattagcagctcaacatgtactcttgttggcaggaaaaaggacttataattccaaagaatgcaagcagagtggaacaatttgaaaagaattctggtactagaaaccattgcaacaacttggttgatgttatggacacacaaaatgtagcaccacctaggcaaaaggaactaccggtgtcaagtaccgctcctggctctgttcttgataaaccatgtgcgtgtttgtctcagttgttttgttttgttttgttttgttttgtttttcaacctatatatttgtcagatcaatgtctatgcatatcttcacattagtttaatcattcatcttatttgtgcagtggttgtgaaggttaagttgagtaaaggaggacctcgtgtatcgttgtatgagtcgtgtaaaaagcttcagtggccaatgcctatgtttgaatttgtgaaagtcgagccaaggtactactgtttcacattgtgtttgctgttggtttgtgtaaacaactacctaatcttttcacttttgaaaatatcagtgtgtgctcctcttccggtgattcttcacaaaaggttgcaccccaaggatatgcatttgcttcaacaataacattgcatataccgaacggcgatatcatcagcctcacaggagacggacgtgcggataagaagagctcacaggattctgctgcgctgctcatgctctatgagctgcagcggcgaggtagattccaagtccaagaagta

SEQ ID NO: 797 - DNA, 5787 bp, Sorghum bicolor
  source 1..5787: mol_type = genomic DNA
tatttttgttacagtatatctataatttaaagattagtgtctcaaaccctggtccaccagtattgcatggcattgtgatcaaaatatgcgctagaacgttgttgaagcaaacatagcttaatcaccgtctgcgtagcttaggcctcgtttagatgccaaaagttcaacttatgaactatattgtagtgtttttgtttgtatttgataattattattcaatcttacactaactagattcaaaaaatttgtctcgcaaattacaagcaaactgtgtaattagttattttttatctatatttaatacttcaagatttgatatgatgagaaatattgtaaacttttggaattttggatgcatcttaatcaccgaaagaacatttagccgccaatccttttgtcaacgcttattagtcgaatcagtcagtcatttagtagtgttttttctctcacaataaatcagcaatcgtactttctgtcatgacatatcagtcaaatgaacaatgacaacgtttgtttcagcagcatgttttttctcactccccacctgcattgagacttgtgctataatttttgttaggtcttatttagatgcgaaaactttttggattttgctattgtagaactttcgtttgtttatggcaaatattgtccaatcatagactaactagaaccaaaaggtcagtttcgtgatttgcaaacaaactgtgtaattagtttttgtttttgtctatatttaatacttcatgtatgtaccgcaagatttgatatgacgaggaattttgatttttgttttgtttttggggtgaactaaacaaggccttaaacaaaaactttttaagattttctatcacatcgaatcttgcaatacatgtatgaagcattaaatatagatgaaaataaaaactaattgtatagtttacctgtaaattatgagacgaatcttttaagtctagttactctatgatcgaacaatgtttgtcaaataaaaacaaaagtgttacggtgtcaaaatccaaaaactttttgatctaaacaaggccttagttttaatttttttttttgaaaaatagacactgtagtattttcgtttgtatgtgacaaatattgtctaattatagactaaataagctcaaaatattcgtctcacaaattatatacaaactgtgtaattaattattttgttatttatatttaatgttttatacatatgtcgtaagattcgatttgacagagaatgtgaaaagttttgtaaaattttatgagaaagcctataatcgataaaaaagataagagacgtggtaaatgcacttgttccgcggtacacagcagtctgtcaatacccctcacggccattctggaagcctcactagcatcagtgtactgtgtcccgtaggtttctagcggcggaggtgaggagacaagccctgcgccgtcggtcgccgtcgcggccgcctcctcccgtcctccgccttctcaacaggccgaggtaaagcttccagaatggcggtaagcttcctgcctttctcaatgtatttaaatgctcattcagtttctcttttctctttcctacgagaatggcgtagcaagattgtatcttttgtcttcaatggggcttcagatttattctctccatcccaaattataagtcattctaagaatattggagagtcaaagaatctcaagtttgaccaatattatataataaaataataatatttatgatattaactaagtatcattagattcttcatcaattatattttcataatatatctatttgattttataaatctttataattttttctataattttagtcaaacttaagatactttgattatataaaattcttggaatgacttataaccaactggggtactcacattgctattggttttggttcaattgttacttgagatatacctgaagcgtgatgaactcttgtctcacaggacagggtcggtggcagcgacgacggagacaagtccgagtggaatagtgacggtgaggtggcgaggagcctcgatggcgctggctcgccaattgcgccctcgaggaacaagttaaaagatgctcctggcccgtccctgctggtaaggcagctaagtgatgggtacaaggctacaagcacgcgaatgcgtagctaactcaccacattgttattacgttgtgcatatgaccctaatgtggtgtctgcttgtggaattgtgtggaatcatggtaatgtgaaggtcaatggagcagggccatctgcctctttggtggaggactttgtagggatgggtcttattaaggggaatggtatgtagtctcctatttccccttctgtttttctaggctgtgactgtttttcgtacttcttttgacaactgatcttgctttcaggggatggtggtgcagagtcattactagagctccttctggcatacaaggtattctcgccagtttgcctccttttattgatcattcgttttgatcctcttattggatggtgggaaaaatatattttatttggcaaaagtgatattgtgaaatgcaggcgataggcaatgacccttcattggataaatcctctgcttctgtttgtggcccccggaccatttgtgatgacaaagacattcttgcgaattgggatgcgcatgatgctagtacgagcagtgacagggatcatgcatctgatgattctggtgatgaggtactttcaagctcaacagccctcccataggccataggctacagaaactttcactgtacttgaggattcaattaatttacctcatcccttgtaaattagttttgtacttatttcatggtaaccgtgccctgcacttttggtactgcacaaatcgattacttggccaaaattgtagggtcatgcaatgctgccattcccctttattttttttacaaagaaacagtgcctgcattggatatatagctgtaacagaaattggatgtgctttatttcccgtttttgtttttcctttttattttgagggtctgttgttttgggcaaactttcatagttccatatgattattaagcttgctaatccaggtattgattccatgcctctttcatcttgaacttcaatttttacctatggtaattgtatggtgcaacctgcaacagcattcgtagttctatctatcaatgaatttgtcttgtattatccattgtagtactttgctatttttttctattgaatatatgtacaagcaggttacaactaggttggagttgtaattaatgattagggatagagtttgggttgtgctataaatataaggacatcactattgtgatatggatagagtttggtggctggtgtgggcggcagtggcagttttactgccttcatcgggtggctgcggtgggatgagcatccgtagaccgtagtcatcaccctagtgatgtagaccactttggctgaacatagtcaacaaatattgcaccttgacatcattctgttatgtggctcttgagataagagcatggtgtgtgtactttctatgcttccatgctcatcaatttgaggctgttgacgtgttgatattattgattgttttcttttttacagacttgtgtatctagagttgtatgcagctaaccggttgaattaaacaaattgatacctaggtactaaaattttctatttcctagttatgccctcggtacctttgaaggactgttaaatgttcttccgtagaagtccaggttccatctatttgtataatctcagtgctttctaatatggtttcctgtgcttttatgcaggatttcctacagggcttgtcacagaaggatgaaaaaattgagtccttagtgagaatgggctttcctaaagatgaagcagaaatggccattgtcagatgtggtatgctctctattgaagtttctacaaatgtctttttggtcatgagtagctcctttctgttgtttttacaggcaattgtatgatattttacattttaatcaccttatttcacccacctcgttatgcatatttgcttacaagtacccagttatatgtactcagcaaaataagttagttttgtagaaactttgttttcaaggttaagttccagattagtggcctatgttattttatagatcaatcaattggctaacagcactgctatgtttaatgtgactattgagttcttttatttaggttttctagctttctgagaacattcctcaagtgtttaagcattaaaccagtggcgtgaatgtattgtctgcataaagtcaggggttgtaggtaattttttgagtctgaagagagagcactaagggtatcagccactcacttgctatcaaataatttttttcccctgtaagcatgcatatctcttgcagactcgtacggtcttatttctgagttacgtctacctacagaatttgttccgtgactttcttgttagacacactccaaatgccttgttcactgattctttctactttggtttcaaactacaagggcaggatgcacctatgtctgttttgattgatttaatctatagttcagaagcttcagaagatggttactatggcaatttctctggccatgaggtaagtatatatgtctatttcggttagcaaagaaatgtttggttccttaaattggatggactgaaactagaactgtgttttgtaattctacaggatgattcttttggaggaagaaaggaaaagagaaagagatctgaagatgcagaacaaggcagtagccatgatgagccgatgcctctcccaaacccaatggttgggtttaacctgccaaatgtgagcttaagatcagtggacagatctctaccatcaaaggctattgggccacctttcttctactatgagaatgtagccattgctccaaagggtgtctggacgacaatatcacagttcttatatgacatccaacctgagtttgtggattctaggttcttatgtgctgctgccaggaaaagaggttacgtacataacttgccaattgagaacaggtcacctctccttcccttacccccaaagacaatatttgaggccttcccccatactaaaaagtggtggccctcatgggaccctagaaaacagttcaactgcctcctgaccagtatggctaaacctaagttaacggaacagattcaccatgctcttgcaaaatgtaaagatccaccacctcgacgtgttcagaagtatgtcttggaaacctgcaggacggcgaacttggtatgggttggtctgaacaaggttgctcatctagagcctgatgagatggagttcctgcttggtttccccaaagaccacaccaggggaatcggcaggcctgagaggttcaagtctttgggcaattcattccatgtcgacaccgtcgcataccatctctcagcacttcgggacatgtttccacatggcatgaatgtcctttccttgttctctggcattggaggagcagaggtagctctccacaggctcgacattcgcatgaagacagtcgtttcggtggagatatctgagacgaacaggttcgtcttgaggacttggtggaatcagacccaaacaggcactttgatagagatcaccgatgttcagagcctgactaccgagaggctcgagtcatgcatcaggaggattggtggttttgacctggtgattgggggcagcccctgtaacaatcttgctgggcgcaatcgattccaccgtgatggcttggagggagagcagtcgtcgctcttctaccactattacaggatcttggacacggtgaagtccatcatgggcagaatgtag

SEQ ID NO: 798 - DNA, 8672 bp, Sorghum bicolor
  source 1..8672: mol_type = genomic DNA
aattgtgcaattagtttttattttcgtctatatctaatgctttatgcatgtgctccaagatttgatatgatagaaaattttaaaaagtttttagtttttggagtgaacgcctaagtctagtggcgagcgcgatggagcgacgctcaccgggacgcggcggggcacatgaggccgatagagtagagcaatggcatcacggtggtgtttgagcaaataattgagccacactaatatctcgctggcaccgaaaaacatcgcctgctctaaatagtttggctgcctgtttggggttgcttctctcctcttaatcatgctaaaagctatatagattctagatcaacatattttctcatgattattctctccgtatcctgcttcaacttgaccgttggatggactgttagtcagcagtggagaaaatcctcttgattctctcctttcctttgtctcggctccacctgctcaaagctctactcccgcctctcctgcttgagccttgcctccgcctctgcctcacccagcatcaggacctaagcgtcgcagactcgctgacacactcgcctccgcctcctcactcagccaagattgagtgttttggactagattttaattttgagtgttttggatctaaatgtaaatggttaggaccacaagtttaaggactgccactgcatttaactctatttattatataaaatatattatatctaaaaataattacatgtataacaaagcactacttatttgatataataaataatttaataacatattttatataaaaatcatataaaaacgatcacatgctatcgctatatctacggtgctttaaaagctatatcacactataaaatatatgacaactataatagcctaaataacttaataatattttttatattaaattatataaaaccagtgaaagactgtcacgcaatgcgcgtgacagctagcggtgccttaaaggcgctgtggtggatgacatgtcctgtcaccaccacataaatacagtttttctctctcttctcattatcttgagatctgcgctgcgccgcgactctgcatctggccgtgtgcctcaccaaattcgaaatggaaccccgactccatctgcttctgttatcatcgggaaatgctccccacaccggtgaccactgatcagccgccacacaggatctttcaccacctactttctctgtctacaaataaatattgcatgtgtaaatcttgaaaaattaaacttttttaaatttaactaaaaatatattaaataattttaatatttatatatataaataatatattataaaagtatattttataccgaatttaatgatatatattatatatgataaatattagtatatttttttatatatttgattaaacttaaccatgtttgactcaaaaaacgagacgtacatttattggtaccggcgttcccgggacagtgccgcactctctcgctgacagccctggcacacatgaggctgtccccacatgccagtggcgtaccaccagcgacctgcccattgctggtgctgtttggcgggcgcggcgcgtgagtttcttgttgagacttgcttggagattcgccgtctccccctctcgtctaaaagcgggcaaagcagagacggtggaggcaggcagagccgccctgtcgccggcgcggcctcctgctcctcctcctcctctgccaccgcctcccaactcccagcgcgcaggggccgacggcgacgggaggggagaagcggcagaggtagtccgaggaggggcggggccgacggcgacgggaggggagaagcggcagaggtagtccgagggggggcggagagaggctgcgccgtcccactccgtccggtgcctcagcccccggagccccttcgcgaaggttcgggaatggcggtaagacctcccttcccctgctttcctctactctgtccccttccagcttcgtttggctgctggggaaagtaatacaagagagaaatcccccacgcagggattgggttgatcccctcccaccacccaatcccctcccaccaacgtgatccaatcccttgattccctggcatcatttggattgtgcgctaattagctcagtttggcgttttattgtgttcgtgtactactaatgctcatcaaagctaattcaatgttgaatttactgattatttaaccataattcaaaatggtagtgttctagaattcagaaccgaaccatgggagagcacaaaaacgagctctaaaattcaagaaaatactagcaaaatccatgtctaaaattcaaaaataacagaaaatgagcaagagaagccatttttcatcagtaaaaaataaaaaataaatgtattggaaggtgcagcaacgattgaaacattataagaaaaaatatgtcgaatgtaatcacatcacatggtcatataccagaacattcttcaccaagtttcgaagtagctcacggctaagtaaggaagacgtgaccatcagcatattgaactagggcttgcacatgcatacacaaatttaggaaacaagacatttgttttcaagattcctaaataaataaaatagtgctagcatcccagcggtgccgaaagaagttgaactgaaaccacttagacttgcacttgaaacgaaaggtgcactttcacttctttcctgcaagcaaagtattcatacttttagacattggtgagcaacaaggcaagaatacttttacaactctgaatcatctgccagactgacgaaacggaagaccgaaagcaagctctattgtacaaagtctgaaaactactctgtaagaacaaacaatatatgatcattcaattctccaaagtttttcacagtcagtcagtacacttgtattgctaaaagatttgctgacgagaggcagcgcttaagtcaagtacacttgtatcattgactattatatactgtgcaagaccccagggagatgagcaacaagtagagaactcaaagaacaaaatttctgaaccactctgttggaccacggctagttcaacactgcaaacacctcaaagcagcaaacaaatcagcaataatcgtgtacagtaaacacaaaatagcttccaggtcagtgccacatttccaagaccataagaaaaatctatagtatccgattacattaaagagaatggagagagcatattttagtgatacaacatagttaaaattttaatgatataaaaggacaagtttaggcctaatctgcttcgtactgtttcttcaattgccttgtttcccttatgtctgcatagtgcatactggttcaaagcaaagctttctagtgagttcatgaaagtaatgaaaaaaatgtcagcaaactcaaagacaaaactaaacaactaaccatttcttccttatccaaatcagacgtgttgttgaatctgcattcatgaaaatttccttgttctaagcatctttgaaaacatcaaaagcttcaaccttttcttcgctagtgagttctaccatggtgttgatgacactaatgcattccttgatgaagtattcatccgctcctgatcctgcccttgatttctctgcaacctcaccaaagccatacctaaaaatcacagaggctttctgctgtttcttggacaaggtcacagtcgtggggaacaaaaggagaagggagaagctaccaataatctgtcaaaacgaatgcacaaaaacaagtcatcacagatctgaaattttaagatggataaaagataaccctgagctacttaagcccatagctaattagatagacatatatgctacaagatgtgaaagtaattagacagacatagctactcaagcacatcatcagtaagaagttgtaagctcaaatcaacatattgcagcaagaacccatcctctataatattgtataaatgctagatggaaatatttgcagacaattacattgcaatttttcttcaacaatagctctgattgcctagtcgattccaagtgctttgaagaaaaaagattgaccaagatttgttgtctacaaaacaaaaaaaaaacagcaggttctagattagataatttattacatactagtagtaggcgagataaacaacatcataagaagataatgagaacattcatggtgtagtattgcagccacttgtcaacaagattacagtcggaaaattataggcatgcaacacatagaggtagtacatcagtgtatatataattttttataagaacagttatagactgctttacaatccaacccaatcttatttcagaacaatccatttgttaatagaacttcataatccaacccaatctcagatcagaactctaaaaatgcacaacaaagaaacttagcaagacaacatagagtggacagggagaccaagccagacctgaatgcagtttctgtgcatccacgtggatggaactccagcgtgggtttgcttccatgggaggccggaatcccttccgatccccgcagatccaaggctatccaaacgaagcctccatgtattgtgaagggatgatctctcgcgccatgaattcttgatgctaataatctggtccactgctacggtgattccgcgcgttagattgggttccctgatgtcgcgaggttgggttttgttcccttttgctgctcagcgctagggttttcttaacactggatcaagttagagcttgcattttggatgctatttcgggattgatggtggtttggtcctattgtttctcgatgtgcctgatgtttagttcttaattcgtgtcacagcactgggttagcgacggtgatggcagtgacagcttcgaatgggatagtgatggcaatggggaggaggcagggagcttcaacactgctggtgccagttcatcagcaatggcatcaacgaacactgacgctccaggcccatcgagacgggtaagccaggtaactgatccatacatgcagcaatgtgtgaactcagctagttgttcttcagttcatgttactcagggtttttcaaatcacttgcgctaaactggcctgggtgggggtggatatatatgataatcatgaacaaaatcaggatcatgattagtgtatagcgacacgaacactctttgtgttactgttaccttgtttctgctggctaccattgtaatgtttctgtttgtttgtggggccgattttaaggttgctaatggcaatgggaaggctgggccatctgcctctttggttcagaggtatatagacatgggtttcgcagaagagattgttgtgaaggccataaaggacaatggtacttagctaataacccatttcttctcattcacttagattctatgtgattttatatactctacctgacagctgctttttttctttcaggcgataatggagcagatgcattagttgagctgcttcttacttaccaggtattcatttgtgttcgtgcttctattagttattctttgatgatgttttttgcatggtgtcaaaaaggatttgtatttacaaagtgatgctaaatgcaggaactaggcaatgacctcaacgtggataacggctttgcttctggttgtgtcccccaaactgttgacgatagtggtgatgatgactttctagaaaactgggatgatttagatgctggtgggagaagcaccagagttgctaattctgttgatgattctggagacgaggtattttgacgcgcccccttggtgactgtacgcgtttactttattcttttgagaaacctgctatgtatttagtttgcttcaatcatatatatacttatgcattaaacttgtttaatgttaatccagtaagtagactgcttataaaaaaaccataaggttccttacttttacttgcacctgttcctttggttttcaaacagctgttagctacatagctgtactagaaagccaatctactttgttttgtcccttatcttttgggacaaccgggttcttttaggcaaaacagcatgtttgaatgaaaccaaaatcattaattttgtaagaaaatcgtatcactaagacagtaagcaagaaagttatgtcaatcataaacttggaactattgcatttcatcttatgcgtatgattagaactttcgtgttaatgacattcttgaacaagacgccaccatggactaacaaatgaaattgcaaaattgtgggtgggtcattaatgatgttcttattttgtatctgacattcatttctttgtacttaagtttggtgtaccccctcctccctgtaatagcactctctcctagtgttttaacttttaattcacgaaaaaacccttcagttatgggttataaattataatctatttcctttttttgatacttgtgcaattgatcactgatcctgagaattggaggctctgtgtgcaacaacattcctgttcaactctaacattgaacttgcattgtactttctggtgtttggcttgcgacttcatgtagctgagagttgattgaattggactacagctggacttccatttttttacagttacatttgtttttgtcaataagaaactaattgttttcctaacttgtccatagttatgatacttcccatttttatacatattataagaattgttgtttttgtcctttggaaggtaattggaatgctagtttatgtagcttgtcaactgtattctcagtgctttcctgtgctttctacacaggatttcttacatgagatgtcacagaaggacaacaaaattgattccttagttaaaatggggtttcctgaagacgaggctgcactggctattactagatgcggtgtgctctctgaacctttattccatgctcctctgtttgccttagattcagtttccaaccttgaaagtaggatatgctctcatatagaataaatcagttgagtaataacattgccatgtttaattatatgtctaactttctattggtttatctctggaatctggattttgagaattttcctcaaatgctgtaagttggaactcgtaaattggctacaatcttgaactgagataacctagaatggtttattctttccaagcttgatttactcagattctgtccttgcccctgttttattttaacttatcttcagagtttatcattagatcttgtctaagtattctccaaatgcccctgttcactgatcatgcaccttacaccatctactgtcgtctgtggtttaaaattactcagggcaggatgcgtctatttctgttctggcggattctatctatgcttcacagaccgcaggagatggttattgtggcaatttgtctgactatgaggttcgtctttggtgaactgtccatacaagtctgcaataagatttagttctaatttaatggtctgataatggaactgtgtttgcaatactgcaggatggagggagaaacaaaggaaggttcatggatgggaacaacaaaaagagaaagagatatggaagtcaagcactgggaagtagaggcccattagatggtagcgctgatgaacccatgctgctcccaaatccaatggttggatttagcttgccagatcagtggccaagaccagtgaacagagatctacctgcactagctatgggtccaccatacttctactatgagaatgttgctcttgctccaaaaggtgtctggactatcatatcaagattcttgtatgatattcagccggagtttgtggactcgaagtacttctgtgctgctgccaggaaaagaggttatatacacaatttgccacttgagaacaggtcacctctcctccctaaacctccaaggacaataactgtagcatttcctcataccaaaaggtggtggccatcatgggacccaagacaacagttcaattgcctccagacttgtgtgtctagtgcaaaactgttagagaagattcgcgtaacccttacaaacagttcagatccacctcctccaagagttcagaagctggtgttggaggagtgtaggaaatggaatcttgcttgggttggcttaaacaaggttgctcctctagagcctgatgagatggagtttctactcggctttccgaaggatcacaccagaggtatctgcaggacagagaggtttcgatctctaggaaattcatttcaagttgatactgttgcttaccatctctcagtcctcaaggatatgtacccagaaggcatgaatgtactatctttattctctggtattggaggagcagaggtggctctccacaggcttggtatacgcatgaagacagttatttcagtagagaagtctgaggtcaataggacaattctgaggagttggtgggatcagacgcagaccggtactttgattgagatcaatgatgtgcagacactgacatctgagaggattgaggcatatattagaagatttggcggctttgatcttgtgattggtggaagtccctgtaacaatcttgctgggagcaaccgtcaccacagaaatggtttggagggcgaacattcttcattgttctttcagtatgttaggatcttagagtccgtcaagtccatccagcgtttatagtctttaggatcttcattgttttggttctggaattgtagcatctttcgttgtgatcaaacttgtgaataatttgaacgtcgactggtgtaattctcatgtcactctaatttaggctacttttaattttatcccctttggtg

SEQ ID NO: 799 - DNA, 5984 bp, Sorghum bicolor
  source 1..5984: mol_type = genomic DNA
tgccctgacgtgcctgatgcactttgtcattagacttccagtgtaaaagaaattgatttagctaaactttaattggtgaactatatatgttgtgtttagacgcttaagtgtttttcggataatatacatggtcataaacaatcatgtgtgacttaaactatcaaaaaatgttgttacctggttgttttcaagagcgtccttaaaataaagccatggcgttagcatgggcactatactaaggatatgaacttggcgttcatgatttggactagattttaattttgagtgttctgaaccgaaatggcagagcgccaacacatttaactctatctattctataaaaataaattatataaaagataaccaaagttagttacatatatgtatattgaaacatcacttatttgctataataaataacttaatagcatatcttatataaagattaggtagaaatagtcaaaagctattacactggatgcgtgacaattatagtaataattgaacgactactacatatgtgacaactgtagatgggtggtaggtaaattagctcgctctaccagccacgcaaacacagttctctccacgccatacaaatatagttttctctcaactttcgttgagatgtgcgcgactctaccgcgacatcaaattcgaaataaaaacttagatcccaatggtttctgctggtggtgttggaatatagggatatagaatgtgggataaggaaagacaaataaataaacaactaagattaaataaaatataaagaatgaaagattaaaatataatattattttttgaaaaaaatcaaatatcactattctaatctcgatccaatatttaggctttatttagttggaattttttttgcagtatttttatttgtatttgacaaatattatctatttatggattaactaggcttacaaaatttatctcacaaattacagacaaattgtgtaattaattattttttaaatttatatttaatactctatacacgcaagatttaatgtagaaaatatgaaaaattctgtacaattttataagaactaaacaaggcctactatcatccggaaatgctctcgacacgtgacgattgatcagccgtcacacgggttctttcaccgcctacgtaccggcgtaccggggacggtgccgccctctctcgctgacatccctggacatctgagcggtccccacaacacagtggtgtacaacgagcgatgtgcccattgcccgtgctctttggcggacgcgtcgcgtgacggcgtgagtttctcggagtcctggagattcgtcgccgtcgcggcctcctgctcctcctcgtctgccactggcttccaagtcccagcgcgcaggggccgacggcgacgggtggggactggggagaggcggcagaggtaatccgggcaagctgtggagcggagagggcggagagaggctgcgccgggccacgccgtccgggggtccgtcgccgcagcttccggccacgccggggccgtggaaaacgagagggatcgagggaggggtatccgtcggagcccctttgccaaggttccggaatggcggtaagacttccctttctctgtccccttccatgtattgtgaaggaatgatctctcgcgcgatgaattcttgataccggggttttcttaacactggttctcagttagaacctgcatttttttatgctatttcgggatggatggtggtttgatccattgttggtcgaggtgcctgatgtttagttctaaattcgtgtcacagcactgtgttggcgacagtgatggtagtgacaacttcgaatgggatagtgacggcgatggggaggaggcagcgagcttcaacgctgctggtgccagttcatcagcaatggcatcaacgaacgctgatgctccaggcccatctacacgggtaagccaggcagccagctaactgatgaatgcatatcagcatatgcaacaatgtgtgaactcagcagctaggtgttcttcagttcatgttacttagaggtgttcaaaccacatatggtagtcatgaacagaaacatgatcgtgattagcatatagcgacacgaacactctcaatgtatactgttaccttgtttctagtggctacgattgtaatatttctgtttgtttgcggggctgatttgaaggttgctaatggcaatgggaaggctgggccatctgcctctttggttcataagtatatggacatgggtttcccagaagagattgttctgaaggccatgaaggacaatggtacttagctaataacccattacttagactctaggtgattctatatactctatctgacagctgttttttctttcaggggataatggagcagattcattagttgagcttcttcttacttaccaggtattcatttctgttcctacttctaatagttattctttgatgatgatgttgttgcatgtcaaagaggatttgtttcacgaagtgatgccaaatgcaggaactaggcaatgacctcaaagtggataatggctttgcttctggttgtgtcccccaaaatgttgacgatagtgatgatgatgacattctagaaaactgggatgatgaggatgctggtggtagaagcaccggggttgctaactcggttgatgattctggagatgaggtattttgatgcgccaccttggtgactgtatgcgtttactttattcttttgagaaacctgcttaaatcgtatatacttctgcattaaacttgtttaatgttaatccagtaagtagactacttatgtcgaagaccataaggttccttacttttacttgcacccgttcctttggttttccaccagctgttagtagggatgaaaatggattggatatggtcgaatatcaccgatattacatttgttttcatattatttggattcgaatacggatagtgtcagctatatcggatgggatacgtagatgttgacataataaatatacgacttgagtattcagatacggatacggtatgaaatgttgaatatctggatttggatacggacagatctaaacacctctaaacggatttggcctctaatacggtcggaaaatacccttaccgttttcagccatagctgttagctacatagctgtactagaaagccaatctactttgcttttcccttatattttgggataactgggttcttctaggcaaaataacaggttcctgtgaaaccaaaatccttaattttgtaagaaaatcatattggtaagacggtaagcagtgtcaatcataaacttggaactattgtgttccatcttatgtgtatgactagaactctcgtgttggtgacattcttgaacaagacaccaccatggactaacaattgaaattccaaaattgtgggtggttcgttaatgatggatttcatattttgtatctgacattcatttcctttaacttaagtttgctgtaccccttcctccctgtaatagcattctctcctactgttttaattcacaaaaaaaatagttatgggttataatctgtttcccttttgatacttatgcaaatcaatcactcctaagaattggaggctctgtagtgcaacaacattcctgttcaactctaccactgaacttgcattgcactttctggtgtttggcatgcgacttcatgtagctgagagttgattgaattgttttcctaaaattgtccatacttatgatacttcccatttttatacaccttacaagaattgttgtttttgtcctttgcttgcaatgctagtttgtgtaccttctcaactgtattctcaatgctttcctgtgctttctacacaggatttcttacatgagatgtcacagacggacgagaaagtttattccttagttaaaatggggtttcctgaagacgaggctgcactggctgttactagatgcggtgtgctctctgagcctttgttccgtgctcctctgtttgccttagattcctcagcaaaataaacaccaatttccaaccttgaaagtaggatatgctctcatatagaataaattatatgtcaaactttctgttggtttatctctggattttgattgataattttcctcaaatgcagtaagttggaattcgtaaattggctgcaatcttgaactgagataacctagaatgggttatccatccgattaatagatgtaaagctttgattctatgagtagcaaacatccagatgctcattcatagcaggcaactaacagtttattattcttttggggtcagaatattttaattgcgtttgcagtcaaataaaactgttttcgcaagttgcatgcaacttgtaccactcagattctgtccttgtccctgttttattttaacttatctttagagtttattatctgaacttgtcaaagtatgctccaaatgcccctgttcactgatcatgcaccttatgccatctactgtcgtctgtggtttaaaattactcagggcaggatgcatctatttcggttctggtggattcaatatatgcttcacagactgcaggagatgtttactgtggcaatttgtctgactatgaggttcgtcttaggtgaactgtccatacaagtctgcaattagattgtttctaatttaatggtctgataatggaactgtgtttgcaatactgcaggataattcctacggagggagaaacaaaggaaggttcatggatgcgaacaaaaaaaggagaaagagatatgaaggtcaagcacacggaagtagaggcccattggatggtagctctgatgaacccatgcctctcccacatccaatggttggatttagtttgccacaccagtgcacaaggccagtggacagatcactgccttcacaagctatgggtccaccatacttctactatgagaacgttgctcttgctccaaaaggtgtttggactaccatatcaagattcttgtatgatattcagccagagtttgtggactcgaagtacttctgtgctgctgccaggaaaagaggttatatacacaatctgccacttgagaacaggtcacctctcctccccatacctccaaagaaaatatcagaagcatttcctcataccaagaggtggtggccatcatgggacccaagacgacagttcaattgcctccagacttgtgtgtctagtgcaaaactgttagagaggattcgtgtagctcttacaaacagttcagatccacctcctccaagagttcagaagtttgtgttggaggagtgtaggaaatggaatctcgcttgggttggcttaaacaaggttgctcctctagagcctgatgagatggagtttctactcggttttccgaaggatcacaccagaggtatcagcaggagagagaggtaccgatctctaggaaattcatttcaagttgatactgttgcttaccatctctcggtcctcaaggatatgtacccacaaggcatgaatgtactgtctttattctctggtattggaggagcagaggtggctctccacaggcttggtatacgcatgaaaacagttatttcagtagagaagtctgaggtcaataggacgattctgaagagttggtgggatcagacgcagactggtcttttaattgagatttgtgatgtgcagacattgacatctgagaggatcgaggcatatgttagaagaattggtggctttgatcttgtgattggtggaagtccctgtaacaatcttactgggagcaaccgttaccacagagatggtttggagggcgagcattcttcgttattctaccactatgttaggatcttagactctgtcaagtccatcatggagcgtttgtagtttttagaatctttattattttggttctagaattgtagcatcttttcttgtgatcaaactggtgaatgatccgaaggttgactggtgtagttctcatgccactctaatttaggctacttttaatttaatctcgtttggtgatcaatgcaaattgatgttggtgc

SEQ ID NO: 800 - DNA, 5487 bp, Sorghum bicolor
  source 1..5487: mol_type = genomic DNA
caaaattttttaggaactaaacgaggcctaaggaaacaaggtggaaacgaaaatatggcaaaagggaaaggcgaagtgagtcaactatttcattcatcatttagtctctttcaataaactctgaggatcctatatatacatgatcgtaggccttacacatggtcaaaatgccttaacacatgctctagattcggagcatattccagtaaatccggggtagttggttcggcgctccttggggccctagtcaccaccgcccttaaactatctcaaataatcatcacccaaaagacacatgtctttgggtagcgctacaggtaaaagttttcatacctatttttagtcttatccaacaacaagacctaaaagataacactctctgcaaatgggtctcgaggagagaggatacccaaatttgggttatgcctctcctaatacccaaagtgggtcttctgtgttggaggctatagatattgtgttggagacccattttggatttgggttcccaaatgggtcttctgttggagatagccttagctagcacctggtcaagagaccacctagggcattgtttgaatgttgtcggattcacttcaatccatgtgtgttgatgtggattggggtggaatttagttcaagttctactctaatccacctcaacacatgtggattgatgtgaatccgactacatccaacgtagattatgcctccttcgtccaccgtcgatgcctacaaaccttgacctggctctctcattttgcctcgagcgttcttgtctcttttcgagactccaatcgttgttgtgacaaaatctgatgatcacctatagatgatgagaaatgctcataaagatggtgaaaagggtgcaaagtgtgatgtcgaggctcgtggccataatgttgattgaaaggccatagtgctgtcaaaaaaaattatagaagatagaaggccataatgttgtaaaaaaaaaaatctttttgctatatctctgctataaatcctctagaaatcttactataagaaaacctttttcaactaatgacatagtgtcaaataataaatatgacttctatatttaaaggaagtacagaaacaggaaggtcagatatgtgccattttatgcttctcttcgtatgtcatagatgatacttataccccattttatgcttctatggaaaaaggtttctattagactgtatcttcctgtttctattagaaggtcagacatacttataccccgtttcatgcttctatggaaagagtatccaaacttttttccaaatcataaatatagtgtcaaataataataatataaatatcgcactccctgtttaataaaccaaggcttaaaagaaaatcaacacaggcaaacgacaaaaaaaacaaccttggaaatggcagaaagaaaaagttacagagcgagccctcgaaccccggtcctagggacggctccaaagcggtggaagtagcagtggcattttcttctgtcccgtgcgctctccccagtcccccacgcccaaaaccccaagtgcctttctcgccgcttccgactccgccatgccaccatagatccagctagggcggcgtcgttgcgttcaatcctgtgcgagagaacgcgaatcgccgccggcttgatattggccagggctttctccgcccaattgcatcaggtctcgccgtcatttgcagcgaccgtgctctaattggggcgaaaaggtgagtcctcctccggtcctcccattacactttttcgatgcctggatcgacgaacatttgggagaaaaaaaaatcccctctttccctcgaaagattcgacaaagaacggttgttctttgtgtacaggaatcttatctgctgaatccccgagctccggcgatggattttgacatggacgactacatagacccctacgaggaggctgaggctgaggctgccgcgggcgaggacgacgactccgacgaccccgacgaggacgactcggatgcggagagcgactacgaggagaagtcgttcggcctcctcaagtccggcaagcaccgggtgcgcaacccggacggcaccttccgctgccccttctgccccggcaagaagaagcaggggtacaagatcaaggacctcctccagcacgccgacggtatcggcgtctccagcaagcaccgccgccacggccgcgagcgcgccaaccaccgcgccttcgcgcgctttgtccgcaccgatccggacttcgcggaagacctcgtcggtatcactggcattcaaggtgccattacaaccacccctgctgataagaatggtggcagtgccaatggcgacgggaaggccaaggctaatggagatactgctggatccagttccgtggcggcgaaagtgggtccgccacaggaggttgagaggtttgcttggccgtgggcttgtgtgcttgcagccggggcagggttcaatcctgaggagtttgctgatagagtagcggtgtttagtttggttgaggttgtgcctttgtttgttgatgagatggaagtcacagaaacctttgcaatcgtgaggtttaccaatgattggagtggattcaatgacgcgcttacgcttgagaaccattttggtgtcaataagctagggaagaaggagtttgagacgagagacagtggtctaggttccgtggagggagatggcggcaaaggtgaagtcaaggtttatgggtgggttgcccgagccgaggactatgatgcaacgagtgtggtaggaagattcttgagaaagcacaccgtcctgaaaacaatagatgaggtttccaagactgaattagagaaatcaggggagatggtggcaatactggcatcccagatcgaggaaaagaaccgatacttgcaggatttggagacaaagaagaatgcgacagaactctccatctcaaggcttgaggacgacaacaggaaactgcatgaggcatataatgaaggtaatctgtgcaatttctctcccttccctttggttctacttgatggtttagagtttttcctgcatgcttgatatagtcatgtctagagcatattcacatatgttaactctgccttgtactttacgttttatataatttttatggaagtcctgaaactatttggttggtttttgttccctctttatattgtacatggattatttggataaaagacattatggattggttagacaaatgcaggacttattgagataatattatgatgcatgaagttactccatgccttatatgctttagcattatatttatcagttagtcaagactaaagacttacctgatgagatgaactttggttacatgtaatgacaaactgctcccaatctttaattttgagtgcttgaattttgtggctttacaaaatcaacaaagcaaattttctctgttggaagtcatttatcttataaattttatatcttttttttttcagaaatgcgcaatcttcatcgcagggctcgtgaaaatgctatgcggattttccaagagaatgaaaacttgaggattgacttagaaaataagaggagagaactgaacttacgagctaaggagcttgaaaaaatgtcagctgagaatgctaatgacaggaagacactcgatgatgagaagcagaaggtaagctaaacaactctacaagtgaagcactaagctatgcacatgtaacctcttctgaagtattatgtatatggtgctctaatctggatttattggggtgtcaaacaatcttttatttgcctgtctgagtttaccgtataaacaaggactccataggtctcccttttttttttacaaaggttgttttttgaaaatgatataccatcaatactttaacctagacaagggacacattgctgtcaagtattttatcgtcttaattctatggcatttccccaaggacaccaggtttctttctactacctaattgtgtgcatataaaataaaaataataacagcctgagcatatcattatgatagcataagttcttgctgcagtatcttatacattccttttgtgtttcttctgaaatgtacaggcaaaatatgataatagtgaacttgagttagctagcatagagcagcagagggctgatgcagatgttctgaagctattggctgaccaggaggtttgcgctttgcacatttcttaatgttgttttctacatgtttctctataatctgaagatgagaattgatacaccttaataccatcagagggaaaaggaagaggtacttgctagaatgcttcagctagaaaaggagctgcatgagaagcagcagcttgagcttgaagtagaacggttgaatggtacactccaggtgatgaaacatttagagggagatgatgacgggggagatatccatgagaagatggagaagctgagtgtaagatttgagcatgaaaagaagcgcctggaggatttgagtggagatctcgtgagaaaagagcgtgaaagtaatgatgagctacaagtggcccgaaaagaactgataaaggtactgcctattttctcttccatgcacctaacaattcctctaccaagttgatgttcataaaatgattttaattggtgaaatgattttcacaacgatcagggtttggaggaagagctggatgggcagacagctattgggatcaaaaggatgggggaactcgatgaaaagcctttcctaaatgcatgtaagagaaaatatggaaagggtgaataccagataaaagcagcagagctagtcacaaattggcaggaggaactaaagaagccatcctggcatccttttaagatggttgaggttaacggagaaaataaggtacttgctcagttctgtccagctatgcgttatctttaatgtttatataacctattagtatttgctctgaaatcatattcatcctcatttgctgcaggaaattctggttgacgatgatgcaaaactgaagcacctatggattgagtacggcgacgatgtgtgtaatgcggtgaagactgcactgatggagataaacgagtataacccaagtgggaggtatgtagtgcccgagctctggaacttcaggaaaggtagaaaggcaacgatgaaggaggtgctcaagtacctgttcagtcagatggacacgacgaccaagcgcaggaggggctgaggaggcgccccgaggccgagaagccaataagtagcgcctttacgctgctctgtcagtcgtgtgctgctcgatcttctagttagtggtagtctggcataataagtgttcgtaatcaaggcttaggtatgcatcatgttcatgctgttgccgggcaggcgtcctaaaaacctatgtgatcgttgaactgactactgagtaatctttcgtgctgctattattgttcgggtgtaaatagtttggtgcctgctccttcgtggctttctcgtgtgtgtaatcatttgaccgttcatttgtaaatcattgaatcatcatgctgccttataatcagtaggggctttct

SEQ ID NO: 801 - DNA, 2548 bp, Sorghum bicolor
  source 1..2548: mol_type = other DNA
ttgttctgtctaatcaatgcatcattcttctttaaatgctgtatatgagcttgtgacttaccactcacacttcccttttttctgttgtcccttgggatttaatgcttgcattctgtcattcgatccacgtatactacagggaagataccatgagtgtgccactgacaatgatagaaggaaaatgtgaagttaggatgaaggacgaccttccaaattcaaatcttccagtgatagttgagcatggattttactgggaacttttgtttgaccctgttannnnnnnnnnnnnnnnnnnnnnnnnnnnnnnnnnnnnnnnnnnnnnnnnnnnnnnnnnnnnnnnnnnnnnnnnnnnnnnnnnnnnnnnnnnnnnnnnnnnaaatttgtgatgatgagctagatggttcagataaaaaggatatgtcgtcagacaactctcttgcaacccttgatatttttgctggctgtggtggtttatctgaaggattgcagatagctggtatgtacttgtcctgcagattctatacgggttgatgggaacaccttgattgccacagctgtttcactttctgatcatacaattctgcaggtgcgtcaaaaacaaaatgggcaattgaatatgaagagcctgctggggaagcatttggtgaaaatcacccagaagcagcagtatttgtggagaactgcaatgttattttgaagtatgaccattgtttatcatggatatgcttattcatgcaccgcaccttccactcatttctgagtattgtcttgcagggcagtaatggataagtgtggtgatgctgatgattgcatctgtacttctgaggctgctgaacgatcatcaaaactttctgatgagaagattaagaatcttcctgtgcctggcgaagtagacttcataaatggcggacctccatgtcaggtcagttgtttttctctgactaggaaacattttatgcttgttttcgatactctaaaccaattgcataactttccatatgcatcctttttgcagggtttttctgggatgaacagattcaatcgaagtccctggagcaaggttcagtgtgagatggtcctagcattcctctcttttgcagattatttccgcccaagattctttctcttagaaaacgtcaggaacttcgtttcattcaacaaaggccagaccttcagattaacactggcatcactgctggagatgggataccaggtgcttactgtacctttctactaagttgttcttgcattctagcttttcgtccaacactaaattttgttaccttttcgtttacatgttctcaggttcgattcggcattctagaggcaggtgcttatggtgtcgcacagtccaggaaaagggcattcatctgggctgctgcacctggagagacccttccggagtggcctgaaccaatgcacgtcttcgctagccctgaactgaaaataaacctccctgatggcaaacactatgcagctgtcaggagcactgccgcaggggcacctttccggtcaataacagttagagatacagttggggatctcccacccgtggaaaatggcgccagcaagccaacaatacaggtatgtgtcagtgtcactgcaacttaatctccagtcgctttcttctgttggtgcccttggctggtagtatcagctggatttactccttcctatggtgcagtatgggagtgaaccagtgtcatggttccagaagaagatcagagacagcaccgtgttgctgaatgaccacatatccaaggagatgaacgagctgaatctcatcaggtgcaagcacattccaaagcgacctggctgcgactggcatgagctaccggatgagaaggtaaccacagcctgctcctttgtccaccagtagttgttttatactacctttgctctaggtaaccatgccccatttgccaatgcttatgcgagtacacaggtgaagctgtcaactgggcaaatggtggaccttataccctggtgcctgcccaacactgccaaaagacacaatcaatggaaagggctctatgggaggctggactgggagggcaacttccccacatccgtgaccgatccccagcctatgggcaaggtcggcatgtgcttccaccctgagcaggacaggatcgtcactgttcgtgagtgtgccaggtctcaggtaatttgccttcgcatgtaccatatagatcattggttcctcaatagctgctgcaattcagtaacagtaatcaatcaattatttaagtgttttaatcagtccatttttagtatctttggcctgctctagcattactgtttgaattacttaacaagaggcagactagacttcagagcatttctttttgaagaacttcagagcattcatgtgcaaattgtctcttaaacatcccaatcctattcacatgttctttgtacgcagggcttccctgacagctaccgtttcgcgggcagcatccagtgcaagcacaggcagatcggcaatgccgtgccgcctccgcttgcctacgcgctcgggaggaagctcaaggaagccatcgacggc

SEQ ID NO: 802 - DNA, 7275 bp, Sorghum bicolor
  source 1..7275: mol_type = genomic DNA
gagtcaggcactcactgatctccacctggaaccatggcatttcttcttcccaatggtttctatattcttcatcccattttccttcctctccgttcatcattgctttctcaaatcttccctgaatccaaccaaatttcttaaaacaaaagcgtacctgtgcatttttgagctccacacacggacacttgaaaacaagctctatgagcatcttcttccctatcagactgggtgatgcatggcacaaccttattgaaccatgcctccactgtcctgttctccaaccttgctgcacacctgtcatttgtatatgttcatcaaaattcgtataaacccccattgtatcaatgccaattccatgctagttaaaagataactgcatggagttgatgcttcttcccacaatgtagtcttcatgttagagcacctaggtgtggcgttcccctcccgggttcgagcaacggtgtagatggttctgtggccaccaatgaagcaagtttacatgaggttcttgctggctttctaaggttcggttggtccctaccttaagactaagtcaatgggacgtctctctccttgatcaagttagatggaaatggagtcatcccagtctcctacagtctgacccaaatatttttcctgagttgtgacaaccagtgttgccaagacatctgtgtaccttttcttttttaaaaatgtcaaattagacgcccacacccgtgtcggatgccgttggatgccaatacccgcactagcatttgtgtcccatgtgacactggtgacaacttgctgctaaagtacttggcatttgtgtgcttgtttatccacatgtaacggtagtgtcagttgaggcagaatcttcctttataggcaaagcatatgaatcgataataccatattttcctttacaaatttcacatgaactattggggttgatattgcaactatgataacagaggtatgtcgagcgttcagtaagattcaagcatggttcggaacctatttcttttctctaagggtagatgggtagattaattacataggctctatggcattccagtggctaatattaccttttctttctattcttggattgggctgaatattaattgtctaccttttaggacatggtctcctgatgtaatgttgtggctcatgtagttttagagttactaaaggagcactatttacaggctacagctccattttttaccacggattatattttggaagaaataaaggcgtttctaaatgatcttttgtcttaaaatattgtctttgttgctgcacttcacaggcctatatttttctagttactgatagcaagcattaataacggtttgacgtttggtcaatatttattctgttccttaaatctagtcattcatccaagccttccctttttttgttgaatttgtgttttggctgcctgagtgtttcttttcttcgtgttcactgttcagtactgttattttaacttttgttcccccatagctgattgatatgctgaccaatgaattttcaggaacaagaagatgcagagcaaagccacaaaagaaggaaaaggaatccacagaaaacagcaaactggagaatggatctcaggatgcaacagaagaggtgcatcatggagtcgaaaaaggtgatggacatgttacccgcaagagaccaaggagagcagcagcgtgttctgatttcaaagagaaatccatacgcttatccgaaaaaaaatctgttgtcatggtcaagaagaatcggatggaggaagaagaaatagatgctgtgagtctgacaaaacttggaccagaagatccaccaccttgccggaagttgattgatttcatcttgcatgatgcagaagggaacccacagccctttgaaatgtcagaaattgatgacttcttcataacagctcttatcatgcccatggatgatgatcttgaaaaagagcgtgaaagaggagtacgatgtgaaggatttgggcgaattgaggactggaatatttctggttatgatgaaggtactcctgtagtctgggtgtcaactgatgttgctgactatgaatgtgtgaaaccagcaaccaattacaaatcttattttgaccacttctatgagaaggctcaggtctgtgttgaagttttcaaaaagcttgcaaaatcagttggtgggaatcctaaccagggtctggatgaattgcttgctagtgttgttcggtcaattaatgccatgaaaggatatagtggaaacatgagcaaagatttggtgatctccattggagaatttgtatacaatcaacttgttggtttggatgagacatcaagcaatgatgatgaaaagtttgctaccctgccagttcttctttctctaagagaccagtgcagatctagggtggaactgaccaagctgccctctaacatctcgaacacgagtctgaaaattaaggacacagtgtgtgaagggacagcggaagaagaagatgatgatgcaaaattagctagattacttcaacaagaagaagaatggaaaatgatgaagaaacagaggggtaggcgtggaacaccatcccagaaaaatgtctatataaaaataagtgaagctgagattgccaatgactatccccttcctgcatactataagccatttagccaagaaatggatgaatacatatttgatagcgatgacagtatattttctgatgatgtgccagtgaggatactcaataactggactctgtacaatgcagattccaggcttatatctttggaattgatccctatgaaatcaggagcagaaaatgatgtggttgtctttggatctggtttcatgagagatgatgatggcagttgctgttctacagctgagtctgtgaaatcgtcgtcttcctccagcaaagctgaccaacaggatgctggagtccctatttatttgagcccaatcaaagaatggcttatagagtttggtggatcaatgatttgtataaccattcggactgatgtggcctggtaagtaccctcatctactttctttcagcacactgcttcattatgcagtcattaactgtgttcttagcagttgtagcactgaatcctttataccgtttgaacataactttaagtttttttttcatctttactccattacaccttacgtttagagtgtgatttcaggtacaagctacgccaaccaacaaaacaatatgctccatggtgtgagcctgtactgaaaacagcaaggcttgctgttagcatcatcaccctgttaaaagagcagagtcgtgcctcaaaactttcttttgctgatgtcatcaaaaaagtagctgaatttgacaaagggaatcctgcatttatatcttctaacatcgcacttgttgagaggtatattgtggtgcatggacagataatattgcagcagtttgcagattttccagatgagactatccgccggagtgcatttgttagtggtcttttattgaagatggaacagaggaggcatacaaagctagttatgaagaagaaaactcaagtaatgaggggagagaatctgaatccaagtgcagcaatgggtccggcatcgaggagaaaagcgatgcgtgcaacaacaaccaggttgatcaacagaatctggagtgattactatgcacatcatttccctgaagattccaaggagggagatggaaatgaagcaaaagaagttgatgatgaacaagaagaaaatgaagatgaggatgctgaagatgaagggcagattgaagaggataagatctcaaagactccaccatcaacacggtcccgaaagttgctatcacaaacttgtaaggaaataagatgggaaggtgaaacatctgggaaaacatcgtctggagaaactctttacaaatgtgcttatgttagagaactcagaatacctgttggtggaacagtggtgctagaagatgattcaggagacacagtcatgtgttttgttgagtacatgtttcagaaaagtggtggtgcaaaaatggttcacgggaggattctgcaaaaaggttcacataccattcttgacaatgctgcaaatgagagggaggttttcttaactaatgattgtttagaattcaaattagatgacatcaaggaattggtaagtgttgatatccaatcgagaccttggggtcacaagtatagaaaagagaattctgaaactgataaagttgagcaggcgaaagcagaagagagaaagaaaaagggcctgcccatggtatatttctgcaaaagcttatactggcctgagaagggtgccttctttgccctcccccgtgataaaatgggtcttggtagtggtgtatgtagttcttgtgaacatatagagccagattctgatgaattgaaagtactttcgaagaccagctttgtctacagaaaggttacatataatgtcaatgactttttatacataaggcctgattttttctctgaagatgaggatcgtgcaaccttcaaggctggccgaaatgtgggtctaaagccctatgcagtttgtcaaatactggccatccctgaaggagctggatctaaaaaactcaatccagcatcagcaaatataagtgctagaagattttatagaccagatgacatttcgacagccaaagcctatgcatctgatatcagagaggtcttcttttttctatcttatatgtttgatttatcttatccaaaatgtcattgttactttattttctcaaacatgtgtgagcaaatcctggagtcctgagaatggtcattcttgtattcttgttaactttgtttgtttcattcaggtctactatagtgaagatgtaattgatgtgcctgtggatatgatagagggaaaatgtgaggttagaaagaagaatgatcttgcaagttcagaccttccagtgatgtttgaacatgtatttttctgtgaacttatatatgaccgtgccagtggagctctcaagcaggttagctgtactgaagttgctgttctgattcattgactgatacttttgatagttccctgaatgtgtgttctgtgtctggagcagttgcctccaaatgttaggtttatgtccatggtgcaaaaggcaacaattgcttcgaaaaagaacaaaggaaagcagatctgtgagactgatcaaatagattcaggtaaatggttggatgtgccaaaagagaaccgtctagctacgcttgacatttttgctggctgtggaggtttatcagaaggtctgcagcaagctggtatgtactgttaacactaatgctgtttaccatgaacatgatgaccatcagaaaatattttcctcattgtccaatgctgcaggtgtatcttttacaaaatgggcaattgaatatgaagagcctgctggtgaagcatttagcaaaaatcatccagaggctgtggtctttgtagataactgcaatgttattctaaagtaagtgcaaattgtttgatgccattattatgcttttgttgcagaacagaaccaatatttttgataatgcagggcaattatggataaatgtggggatactgatgactgcatttcaacttctgaagctgctgaacaagcagcaaaacttcctgaactgaacattaataaccttccagtccctggtgaagtagaattcataaatggtggtcctccgtgtcaggtttgttattatctacagtaggccagaaaatcatcagtcacctgttcagtttcgtaaatcaaatgcttgaattgttcattcattgttttcttatcagggattctctgggatgaatagattcaaccaaagcccttggagtaaagttcagtgtgagatgattctagcattcctctcattcgcagagtatttccgtcccagattctttcttttagaaaatgttcggaactttgtttcattcaacaaagggcagaccttccgattagcagttgcatctcttctggagatgggataccaggtatttcttctgttcattcattatctgctaagacctatagcttacaccttttgttttgtagtggtttaaatctgtatactcagaaattgtttgccatttggttaggtccggtttggaattctagaagcaggggcttttggtgttgctcagtccaggaaaagggcattcatttgggctgctgcacctggagagatgcttcctgattggccagagccgatgcatgtgtttgctagccctgagctgaagataacactgcctgatggccaatactatgcagctgccagaagcactgctggtggagcgcctttccgggcgattactgttagagatacaattggggatctgcctaaagtggaaaatggtgccagcaaactcacacttgaggtaactgctgctctgaaccatctattttcatttttctctattagcatgctaaatgagctactggttgtcttgtgcagtacggaggtgagcccgtgtcctggttccagaagaagataagagggaatatgatggtactgaatgatcacatatccaaggagatgaatgagctgaacctcataaggtgccaacacattccgaaacgaccaggttgtgactggcatgacctaccagacgagaaggtaatgttctaaaatctgttgtcatcttcattctgtccatggagcactgacccatgctatgctttacaggtgaagctgtctaatgggcagatggctgacctgataccttggtgcctgcccaacacagccaagagacataatcagtggaaagggctgtacgggaggctggactgggaaggcaacttccccacatctgtcacagacccccagccaatgggcaaggttggcatgtgcttccatcctgaccaggacaggatcattacggtccgagaatgcgctcggtctcaggtaagctgctctacattcatttccatcttcaaagaaatgataatgaccctcgggattacctgtcaaatatgatccaatctttgccgtgcagggctttcctgacagctatgagtttgcgggcaacatccagaacaagcaccggcagattggcaatgctgtgcccccgcctcttgcctatgcgctcgggaggaagctgaaggaagctgttgacaacaagcgtcaggaagctggcgtgggcgtccctgcaccatgagaagcttcccttccatggctcatgaagccaaacgctgaggtcgtctttagaaacagcgaagggcagagtagcctgtgatgtcatgtctaaactgcagtaacttagttaatcatggtttcagtcttatggaccccctgagtgtatatgctagcgaagtgttgattg

SEQ ID NO: 803 - DNA, 19373 bp, Sorghum bicolor
  source 1..19373: mol_type = genomic DNA
gtagcatgttttcctttttgagatgtctttttatttggagttgctttagcccgcatgtcacacgcagtcaagtctgtgtgcacaccttctcctcccccgcatatcctcttatttctcctatgacacatccccacaccctcacccccatcgcctcaacgtgtgcgcggtagggtctcactgaagctccttgaccgtagagctctggtgtgcccgtgtcggctttctcctcccctcccgccgtcgccatttccacaggctctcctatccctaaactctaaaccctaccgcatccgtggcagtcttctcctccagcggagctccgacgtgaacctaccacgcctgcgtcggcctccttcttcccctcttgccgctgccatggctatagatgccccctaaaccctaatccctaaaccctaaatcctaaaccctactacgcccgtggcggcctattccttcccctcttcccttcttctcgccgccaccatgcccatgcccaccccaccctgctctggcccgaccgccttccccgccgccggaaccttaacaatcgaacaacagagaaggtgtgcgagcagagtgaccaaattctgtgtggaagtaagcattcttgccttttattttatctttttttcttttctgtctagttcctccattccaaaatcatttttttcatgagtttttttattttattgaattgatttttcttcgatctgcccatcacctccattccaaaattgttttttccattccgccctcccgacacctcctttctttcttctacctttatccacagatatcaaatactcattttgttctcaattataagccgttttgattttttgatacatccattgaacaaaaaaaaagttaaagcgacttataatttggaacggagggaataccttttctaaatatcatgttttgacctttttttctgttttccccacaaatgtcaaaacaatatggctgcttataccagttctgttatatgtcaactgattggttcatagctaaactgggctatgaagtctcaaccaataaagtggcgaaataccgtcgaaactcatatacatacacatgtacgctacctgtaagatacacggtaggagtacattatctatgatggacttaacatatagagatttttttctgaaatagaaacatttttgggaagtaataaaccagtacaactatgagccccgggcaccatcagtgaaattcaatcaattcaattcagtagggtaggccagcccaacccttctctgtcctgtggtctcgcactggcgtgcggcgtgcggcgagccggcgaagccaggggttacggtacgtcggtaccgagcggcggcggcctgcgggagcgggagtcgtcgagtcgggtatccgggtcctgctggtcgagtcgggtcagacgtgatagaggagggacattccaggctgcgcacagtgcgcacgccctgcaaatacacgaaccccgagccgggggccgaggaaaccccaaaaggagattctcctcgccccttccactagagcagccgacggcccgaggcggcgagctcgtcggcgactgaccaccgccggagcagccgccgcctcctgctgggcctgtaccacagctcgcacgagcggctccggtggctgcgccagccgccactgtgctgtcggagggcggctcggaggacttgcgccccctcggcttctctgcgcccgccgcccctccgccggcgtgatcgaggtgagtagttcctcgcattcaatcggttcctgatccccgcgtggtgcaatgcttgggcgcatcgcttattcgcttgattcctgttttttttcctctggtcgcggggtttaatcgcttgattcctgtccttttttgctctgatcgcggggtgggattttttcattttggcttttgctccgtctcgccgtgctgattgccctgttttgccgggtcgggcgtttgcggccgtccgaggtttgggctggtgaactgaagttccccaaagcagggttttagcacgtgctctcttccaggtatagcatacgtgatagggacagagtaatggcttgcgacccgaatggggtcggctagtgtctttggatcccgagggtaagatttttggtgctgttttccactaatcgcaagcccatgtccattgcagaggatgatcgagtcttccatgcttcagcagtcgaatatatatatattttgatttctgaagggctttctcgaatccccaggcatcatcaattttattgggatgcaatagccgtagtcatctccgtgtactccgatgtttagagaggcacttgcctcagcctgctgcgagggcatgcaaaacttctgaggcgtgagctggtggctgacaagctctttgccgtggcagagtcagcgattcgctaatctggtgatctatctcttaaaacttagtcgttacttgaaattgaaatgctcattcgaagttagtacattcgtggagaagtgcttcaaggtcagaatgtagctctaaaccttcattgtctgcagagttcagaagccttgtttaatgttgtgggaaaggaataacccttctgtggttgtaagaaagtgaacgtaccataggtgataggagcacagtgctgtcagaacttggcacatgtagcagcttctcagggcgagtgatttggaatgcttgctattgtatttttctttgctaatttgttaactttggtattccaattggaggttttcatgtgtggaatagttaatggagcagttcatagaatggtgaacccaagaatttttagaagcccggacgatttaatgggctaattaacgatttagacgttgtcccctttctatgtgggctacttaatcattaggcctaatggccatgaacggtgaggaaccaaggcagagaggctcagggtcgccgggcgctcgctccaccagactttctttacaattggttaaaactggttgttttattactgccgcagtttgtcatggtgattttcttttcgagtgagtcatggcgatatcttttaaacgagtgagtactgagtacggtgatgttttaaatggaatatatggatgcttgtgatattggtgtgtatacctggtattatttcttgcatataacatgtattacgttagttttaggtcctgtgatctaagaagggcagttagtgtttttttttcaagcacttctgtttcatcaagaggagaggaagtgatccaaaaagaatacagtacattacagttaagatgcactccagtgcgtaaagcgccccgacaagaagaaaaaacaggggcgggtgtcagttacacgacataagctggcccaccaaaaacagaccacgaagaaatgaaactgccaaaccaaagggcatttgatgttatcaaatttccattttaaagtggtgctcttcagtaatttttctccaaattatttcatggagggatcttgtgatgctataaatatttgaaatgctccagttcacgatgaagcaaagttatgtggtctagcgggtgccaggggcatagccttgctgactgaatggatacttggtgttgcctaattgcttggctccttggtcgttcatcccttgtttgtgagtgagtgtgtgtggatttgttgtgtctgtgtctgagagtgtttgtttgtaagtttgtgtgggcttttgtggccgtgtgtgtcggggtgtgttgaggtgttatctttgttgttttaggggtttctcgtacccccttttttccttcttaatataaaagatgcgcagctctcttgtgtgttcaagaaaaagaagtatttgaaatgctgtgtagtatagccagcaaacagtaaacaaactaggatactcttcatgcttgcattgttagagtgagatttatcatttaaggcgtcctatcatcattatggagtcttcttttgtgtttactttttcattaagactaattactatggattgaaataactgtatttcaatgtcatattcagagttatgctgtacttcttgctgttacactaatatttatggtctgttattccttctgtttggtttctacttctctcagaatgaactatttgccatgcgactcctgtgcaggatggagctacatcgtgaacttcctgaagctactctgaatgccataaaatttgatctcatgaccagtacagatatggtatgttttgttaattttgcataaattctactccccccccccctctctaaattaaagtgttgggcatcattacacttttatactttactttctcctttttgtgaagagcaagtttctacaacttatactctatatgcttctggtcatctatgcaaatgcttattttcttatcaagtcagcacatagagtaatttgattattattctattcattgcattgtgttgtcagagatagttttatgcaattttacgttcaaaaataattttatgcaattattttaccatttcaggaaaaattgagtagcatgagcgtgatcgaagtgagtgatgtcacaagtcccaagttaggactaccaaatgcttcgccgcagtgtgagacctgtggatcgaaaagtggacgcgactgtgatggtgagcacacttgcctaaaaaagtgatattaagcatgctacgttgaagcatgtactttgtgtgcatttttttgtgcaaagagaatcaacttgtcaaattttttagggcatttcggtgtgactaaactggcggcaacagtgcacaatccatattttatcgatgacgttgttcactttctaaaccaaatatgtcctggctgtctcagtccaagggaaggcataaatatgaaggtttgtaccttcctgactgacctatttttatcctcattaagcactacatgttttttctctttgccaaagttcattgataccataatttagtcataaaatcactttcagattatctggctatttttcaagagctctccttgttcatctgatgaactaaagtagggctagagagtcctagacacagaataagagactgcaaaacaaatatcagtattactacatgcaattgtgctattcattgatgagtttgtttgctgcatgttacctctcatgtaatcctttacctatttatttcagtaggtattgattcacacgaaaacagtataaagcttttcaaaaaaaatctgtatatcagtttgatgcttactagctcagtaagttattattctctgtattgtttcttacgttagttaccttttcctgaaaataaatataatataataatttattgtttgcatcaaagtttaattcgcaatacatttgattactttgtgaattgtactaatagttaatcatacagttgaactaacttagctgaaattttttaaatagaactcttatatttgtataattgcctagttccacttatggacttattgatgttattcaactgcttataactgattttaccaaaatgttctatttagtttttaacatggaaacacatggctaaaagtagcgtcctggctcagtttacttatgttttggttggtaatgttatgtttagttccacaggttgctcttcatgtttgggtaggatatgcttgtgttaaatgagcttcagaaataggccatctttgtatgtggcataatagggtacctatgttccttcattgtttatgtttcctcttgtgtaatcctgcttctggtattccaagggttgctcctttcaggaaaagtagggatagacttgagtttatatatagtattatgcctatttcattttcttatcatggttttatcaattcctaaaactattagaggtgctcttgttatgacactaatgtttacacatctataatgacccaatgaggcaatgacccactgttaagtaaaaaactatgcctttctcttataaatcactctttgctttattgaagagattggggagagaaacggttcaagcaacatcaacatgcaagtattgctcagtaagtgcatttttagttctatcgatgcatatttttcccaccttgtattaaatcttgtgtttttgctggacagaaggatggctctaaactttaccctagcgtaatctttaagacgctgtcaagtccaagagtattattgtccaagagtaaacttcacagaagccctagcgtgatggaaagaatttcaattgttgcagaagctgctgaaagagtgtctaatagatcaaagggtaaaggtttgcttgaaggcctgccccaggattattgggattttgtaccttctgagaataagcaagtccagtcaaatatgaccaagataatattgtcgccctaccaagtaatttttttttcagaccttcatctttggtaaaggctgttccatgttggcttccagtatatagatatactaattcactgtccccccccgccccccctgagaaaatactttttcctattatttttaattgggtcactgctactttggctcgagtaatagtgtcaaaaacaggtgatttaaaaacaatgtaggatacaaaaaaggggatttggagttactcatactgtttggagtatttgttatagattttttttattattcacaacatacagaaaacataattgtgattacgaaacaagggcaatgtggtcctcagctacttgtattcacatatttatcatgttttgaacagtaacacctgtccttgtttcattttccatatttgcaggtcttccacatgttgaagaaaagtgaccctgaacttatcaaacaatttgtttcaaggcgggagctattgtttctatcatgtttaccagtaactcctaattgccatcgtgttgtagaaatcggatatgggctttcagatggacgtgtaacatttgtaagcactattttttttgtttaatcttttatccattcatcgttttttctgtccattcatgattagtaaccttcttttcgtttagtgaaccctactgaatgctagccttctgtatagtttagagtaaatctttcaataatttttttgtaagtcatttaattagggcagctccagtgtgaaatcggttttgcattgcaaatttactgttgtggcagaagatgcggtgcatgcactgtggtgtttgatatataggacccaccactccactagagtggggagaaaagcatggaaaaaatagtttttctctctatgtgtctggtttagcctggctgagatgctgttggacacattctcacgctgcagtagctagttttttatccgccatggttcgacttatctgcaacatgcgattttgaatctggcagatacggttcgatcgctacaatgtgcatggttcgctttttcactcccatggttcaatttcatgatacactggaggtactcttaagagcaaatctactgtatatctttggagaacttcctcacctgatttgccatggattaagtcacttcactccatgccatcaagatttcaaatttcttcattccttgccattgccagattgcatggagtgtaaacttctgaaattagcattttaagttctttttttactccattagtgaagaaatagtggttaggactgtgtccgaaggagctgtctggtaattcacataaaaaaaaggagccgtctgtctcatggggctagtgtaagtcttgctccccagttattgttgtgtcaacatgctgtactgtccatggtatcactgctctaattttcttttttttctcagatgtgcaggagaactgtgtgtcattgtattaatagtagagaaatgagtcatacagagacccaaacacacacacacacacagccacttactgactgaaactaatcacctatgtgtgggtgcatgatgtgtgttcattgtctttgaatgtttatctttgttacctttttattccttctttaatgaaatgacatttagttttcctctgcattcgaaaaaaacagtgagaaatctgaaatctgaatggcttggagtgaaatctgatttaatcaatgacaaatcataaaaccagaccagaagttctctgatgtcaagtaatccattacctcttgaattaatgggagagcttccttgatcatcttggattcttgagtgcttggactatctgaatgcataatgattcatgcatctttgagggcgtgtttctggaggtccagacggtcgtatgtgcattttttgtggatgttgatctgtggagcgcatgcttgagctaggggttaacaaaacatttggccccaactagcctgcagtatgaccttagttgcgtggcgtgtttgattttctttcttcatctcttttgttttttgtttccaagggggatgatccacccttctaggcctatttcccctcctatactgaaacagcatgtagttcttgtgcatgtttgaaaaaaaaatattactagcaaacttatggggtacttatgcgatatggtgtgaaacgatttcttcatcgcactgccagatgcacaatctttttttgtcatttcaattttcaaaacgacatgttgtggcagtctcatccacttatctacatgctacagtacatatttgaaccatgtggcatctcaaatgtaaacacatgattttgttcattgcatgcttgaagtaggatgacagaacaaaggcttacaagaggatggttgatgtcagtaggagaattgatgactaccgccagcatccacagttcagtgttcttgcaagttcacttgtgtcagggcgagtctcagaatgcttaaagtcatccaaggcaagaaagctactatcttcttctttctatattgcaatatctatataggatgatataagtcattctgatctgtcggatctgggttcttagttaaaatcaagtgtttgaatgcaaatgattcaatcaaagtttctattttgtccatacccaattatatcactctaacctagatgttgttgacgaaccattatgtttaacacttctaattggttgggttatcactcatcagacaaaactatgttgttcttatttgagaatatctggtttattgtgttctacactctaatatgactatgcagctaagccttttccctagaacttaacctgactgcaaaagagaacggtagccttcttgaaagtgatcaaatgcatgtttcggaagtcggaactgttaccatgaaatcatgttaacattctaccatgaaaacattcaatacttgtccgatgtattcaaggagtatttgtgtcgattagtatcagaagaatatctgtatctgacatgtgagcactcataagtttccacttaaatccaattcaattgtacagaaggaacttaaaccttcaatttgttgaaagtcttaattgtcttcagagctttagctacctactccctctgtttcacaatacctgttgttattttagcctggccagaagaattgaggtagataaaatgactatccaacccgtggttaatcctccataaagtgtgaattactgcatttatgatgtcaaaagcacacattactctcttccatactagctaatgaagtaattgatgggtaggattgggaaaggttggtcaagttacctcaacattgtagaacaagtattttgactgaagtagaagaggctaaaacaacacacattgtttgaacgctagtaacaaaaaactttgttaagcgctagtaaaaataagttaagattctaatattacatttttggtgctaagttaagattctaatactacaattttggtgctagtaattctgtaacattattcattgacatttttatctctttcagttgtactctaaaaagacagatggggagacatctacagatccatctggaatgaaatggctaaaggatgctgttctcagcaaaagatcagataatgcttttaggagtactatggttggggacccaaaaattaagttatgggaaattggcattcctgaagatttagcctcaaacttggttgtttctgaccacgttaattcgtataattttgaaaatataaatttgaagtgcaacctgcaccttctaaccaaggaagaactatttattcggcgaaatggaaagttaatgtttcttcggaaggcagatcagctagaaattggtgacattgcctatagaccactgcaggatggtgatcttattctcatcaacaggcctccttcagtccatcaacattcactgattgcattctctgcaaaaattttaccaattcactctgtcgtatcaatcaatccactatgctgtacaccttttctgggagattttgatggtgattgtttgcatggatatatcccacaatcttaacggtacaggctcgagcttggagagctggtaagcttacaccaccagctgttgaatatgcaagatggtcgaagtttggtgtcactaacacatgactctctagctgctgcacatttgttaacaagtacagatgtttttctgaagaaatctgaatttcagcagcttcaaatgctgtgcctttcagtattaacgccagtaccagcagttattaaatctatgaattttcaaggttctcggtggactggtaaacaacttttcagcatgcttcttccttcaggcatgaagttcagttgtgataggatgttacacatcttaaacggtgaagtgcttacctgctcactggggtcgtcttggctgcaaaataacacgtctggtcttttctctgtcatgttcaaacagtatggttgcaaggcacttgacttcctttcttctgcacaagaagtattatgtgagttcttaaccatgaggggcttaagtgtatctctttcagacatgttctcagaccattactcaaggagaaaactaactgagggagttaagctggcattggatgaagctgaagaagctttccgaatcaagcaaatattgctagatccaattaacataccagttctgaagtgtcaggatgaaactgaagatgtaacttacagacaatctgattgtatccagaacaatccatcagttatcagatcttcaatcatggcatttaaagatgtcttcagtgatctattaaaaatggtgcaacaacatgttagtaatgataattcaatgatggtgatgattaatgcaggaagcaagggtagcatgttgaaatatgctcaacaaactgcatgtgttggtcttcaacttccagcaagcaaatttcccttcagagttccttcccaactctcatgcattagatggaatagacagaaatcgttgaactatgaagctgagggtactaatgaacgtgtgggaggtcaaaacctttatgctgtgatcaggaattccttcattgagggtttaaatccattggaatgtcttctgcatgctatatctggcagggcaaacttctttagcgaaaatgctgatgtgccagggacattgacaagaaaattaatgtatcacttgagagatatacacgttgcttatgatggaactgttagaagttcttatgggcagcaaatagtgcaattctcttatgatagtgctgatgatccggtagataaactcggcgccccagtaggttgttgggcagcttgttccatttcagaagctgcatatggagctttggaacacccagttaatggtttagaggactcccctctcatgaatctacaagtaatattctatttctgtttttattaatgtttatacttattatgtggacaccgctgtctattttttgtccatgtcatgatatatttaaatttgccgtgcaggaagtatttaagtgtcacaaggctacaaattcaggggaccatattggtttgcttttcctgtcgaggcatttgaagaagtatagatatggtctggaatatgcatctctagaagttaaaaaccatcttgagcaagtgaacttctctgatttggttgagacaatcatgattatgttagttagttcacttaaacattgtttttcctgtcatttaatcttataatgctatgcatttgattatttaatgttgcattttgttattagatatgatggacacgacaaaataagaaaagaaggaacttggaccacccattttcatataagcaaggtcttattcttcttttcttcttatgtaaatgaacagcgatttctttcttttatttggattttgaaattggcatataactatctgtttgacaggaaatgatgaagaaaaaaagattaggattgagatttgttatagaagaacttacaaaagagtataacgccaccagagatcagctaaagaatgcaatcccatcaatttgtatctcaaggaggtaagcaccaaacctttttgttaaaaaaatgcaccaaaaccgatttgtgtttcattgagtgtctatctatttttgcctctttctagcagtgttctttgcttttcactgcatgttgatacacatgtagcttatttcacgtccacttcttttttggacaaaataggaggggctttgcccctactggaaatatattaaacaattacaaaaaacagccagtcccaagaagaggggaaaaaaacgaaatttacaagaagctgtctagcctgagactgatgctaggaaagtaacgtttctgcgcgtgttgcaaaagaattgcgaattcatgtttaaacttagctttacaagcttctacacaggattggacttgtttgaatatccaatcttttgtcaccatccagatgctccgggctaggaggataattaaaattccataaagtaagggattgcaaggccatatttgaaagctggcagtcagttgcaaaagggttgtgaattcatgtttaaattcagatttacaagcttctacacagggtgggacttgtttgaatatccaatcatttgtcaccatccagatgctccgggctaggaggataactaaaattccataaagtaaggactgcaaggccatctttgaatgctagcagtcagttgcaaaagggcagtgcaagaacaaatgttccactgtgtccagtacacaatgagctattatatgtgggtcttgccattttttatgggcatatatgttatatttattgatgtgtaccaagaagacgggaaatgtttggcatttgctaactgcagattacaaaacgattatatttaagcaacattattaatttataatagtaatcgacccagaagattgaaaaaaagctggtggttgtaggttcttttttttcttgaacacacaggagagctgcgtatcattgtattaattaatagaaggataatagtcatacagagacccaaacacacacacacacacacacagagagagagagagagagagagagaaactaacaggacttaaaattttaggttctttttgctcatattttatacaatatatctccatctgaacctagcttgttgaattattagaattcaatgtgattctgattatatataaatactttctaactttttttagaatttgtttgttctggaaaaatgtcttatattaaaatagctagatccactgaattattgcatcaaaatcagcaacatgcttaaatttggatttgccaatagatgtcatatatggcacatctctacttattataatttataattctacagtcattgctattcacattctacttctttctttgcatctcctacactatcttttgacatgtttttctactctgcagaaaatgtgtggtaggtgatgagggtgttaaaatttcagcatgctgcatcgctgtcgtagcactagctgaacctaactccatgtctcagttggacactatcaagaaaagggtgattccaatcatactggatacactgctgaaaggttgttacgttttgataacataatataccccataaatttactgtgaatttcctgtagaacttagccacttaggaattatgatctgagctatagcctataggattcctttctaagctgtagtacatagaggtaaaatatttcgaggtgtagcttgtatggctttttatcattctataatatcacacatgattttgtagaaaaaaattgtattctcttaatcagatattatccacaaaatttagttgtcataggagtccataatatatttgtgattttttctctcaaatacacaggagggttgcgtgttattgcattaaagaagagagaatccaaacgacgcacagcacagagcacatgcccatatatcttaggaatgtatcaagtccaaaccagctgtttgctactacaatgataagtcactagatttaggaatgaaagtaacttaacaaatccttggagttgaattccaccctgttttatagattcaggcttactttcagcttgggaaaataaggtaggattttgttttaatagaaggaaataaagcaatttacttcagctagtaactaccattttttatccagttgagtccatgatggaaatatctgttggtggttgatgacattacagatctatatcttttataggaacttctcatgttgattgatgtccaaatgaataaaactggtaggttataaaacttaatatgtttgcactagatagtgggtactccctccatccctttttaactgttgttctcacatcccaagaagtcaagcatactcaactttgactaaatatagaagaaaatattaatatttatggtgcataattagtatcattagatagatcgttgaatttattttcataataaacttctttggagataaaaatgttgctactatttctataaacctagtgaaacttaaataagtttgaccagcacgaataccatagcgacacttaaaaagggacagagggagtttttaagttctttatgagagtgttatatatgaagctacaaataatgcccatgccaaaggttcaaaagttgttctgttatcacccatgacagacataaataagtcagtcaccaataaactaactgacttggcaaggaataaaatgtttttgaaacaagcaaggaataaaatgtgttaagcacctgacatacagtaagctataccaattctatgggtagttctgagaagtcttagcttccttcaaaagattattcttgtaactatagtgcggcagatcatcgggtgatgctttacagacttggggaagaaggaatctcatcagatgctctcaatttgatgatctgggagttcatactctggactgaagcttgtcaccagccagatcatgctatcatattaaagtttttccctataaagctgttacataccttagggatctgagagcataaactatccagagagatggtgatgagtatatataggtctagagagcctcatgggctggaccatatgggcctacaggcctataatataagagtcttcacagttaacaaaagcaacatttttaaagatttgcacttgtttctacatcttgtaatctggcccagatttcccttaaaaactgggccagtctcttctaataaaacaatggcaaagctttgctgtcctttttgggaaaaaatctgatagtacttacgtttggctgcttatcctctctttctgtgcaggttttttggaatttaaggatgttgagatccagtgtcaacatgatggtgaacttcttgtgaaagtttgtatgtctcaccattgcaaaggtgggaggttctgggctactctacagaatgcttgcattccagtaatggagttgattgactgggagctgagtcgaccaagcaacgtagctgatattttctgttcatatggcatagactcagcgtggaaatactttgttgaagtatgtgcccccgtatttgttgccattggttttcgttttcacttgatgaagatttataagcctgattgcctgttatcgtttcatctttagaattgattttaattgttatatatttgcagtctttgaaatcagcaactactgatattgggaggaatattcgtcgggagcacttactggttattgcagatagcatgtctgtaactgggcagttccatgcaataagcagtcatggtttaaagcagcagcgcactcgtttatcaatctcgtctccattttctgaagcatgtttttctgtaagtaccatgtgatttttgtactggtatgtttacatgaaaattgcttgtttaaggcctagaggcccattttgattttaccgtgctttcttcagaggcctgcacaaagttttatagatgctgcaaagcaatgttcagtggacaatctgtgtggaagtctagatgcaattgcttggggcaaagagcctttcaatgggacgtcagggccttttgaaattatgcattcgggaaaggtgtgtatgcattcaaaacatgctgcatagtgacagatgcacaatattttccatgatacacttcaatgcactcccagaaagtgataatgataattttgagggccttgatgcacatccatccataccagtatttacttgtgtggagttcagtttttgcagaaagattgatgcactatatttaataaatttcttctcaattccgtgcccatgcttgacgattgtcagattgtgtatggataaaattcaacaaagagtgtttgatttctatttttttagagtatcagtgttatctctgcttgatgtttcgatcaattaagctgatctcgtgaccgatgtagttttcaacattgaatttgaccatcaattaggctgctgtattttgttatgtagtcaatgaagaaaagaaaccaccatcttaaatatacctgcaggatattcagttatttaatttgttgctaacagttaccgtattttgcagccacatgaaccagaacaagacgagagcatctatgatttcctacgcagccctaaagttcagaatgttgaaaagaatcatttggatacgcgtagacaaagtactgaaaatgcttccatatgtaggttagcatgcaagtctaaaggcagtgcgactgtcaatggtgttgccataacttccgaccaggactttcttcatgctaaagtcagtatatgggataacattattgatatgcgcgcttccttacagaacatgctaagagagtaagaagacaatatcacccttgatggtgctattttactaatttatttttgcacgacttatgcataatgctttggtttcatagttatatgttgattatcatttatgtaatttcttttacttgcatgaaggtacccgttaaatggatatgtgatggagccagataaatcaaaattaattgaggccctgaaatttcatcccagaggggctgaaaagatcggtgttggagtaagagaaattaaggtgattatcaatgatacctgttcttttgaaatatttttccctcaaacacacacacatcattatattaagaagaataagaattagaagaagaagaagaagaaaaggtttagaaaccctaatagcaccaaacccactcacaccaaagagaataagtgtatacgttaactttgatataattgcgaaatcatgagctgcattagaagacatcatattttgattacatttttgtgtatatgtgtttgccatcgggccaagcttattgctaatatcgttagtgttagaaaattccattgacaagctgtccaattatctggaaaaacattatgtgcattaaaattgaatctttatacaatatcaacgtcagcctcctaagcactgtaagcttcccaaaggttgagcaaatgataatccttccgtacaaaccagaacaagatgaccatggtataatttgcatgtacgcaataaaaggtggattacaaccaggggcggagcctgaaggcacccactaacatcactacaatattttttagttaatatattgtttaatagtctatataataatataaaaaaaagatagatacatatttttgtcgtatatatttattgatatcttctagacaacaaaatcatacaaaacccaattagaataaaatattttgattcatctaaatttgtttgcctaccatattaggacacatgtaatgaaattttacattttagtaaatgtataattacatttcattatattttatattttaatgaacccgtactcaactagtaataacaattcattggtcatcaatactttaatatcatcaagcttattgagctgcacaatattatatgtcgattatttttttagtgtgaatcgcagtacagacacagacactcatatacatgcatgcacacccacccctgtaaacaaacacacgtcctaccccattatgagcaccttcgaaaattttgagatttgtgagtcaccacatgtggcttgctatggatagacacaattgcatatcacaggaagaatagcattgtcaaatcgtcaaatacttattggcattatagttattaatactttttatataatttggtctaagttgagatggattgactccttatgaagagagaacgatatctttctagaatggagggagtatactattaccgtatatgtatgtcatgatgcatgatttttcagtttgaatggccccgtatgtctaaatcctggctctgcccctgattacacctggcatatccctgtttattacaaaattgcatgctgtaaacttgatgtgaaaagtattaggcagtgaattgaggctggtatttgctgtcatttttttgatggtgtgaccatttgtcttgcatgcaggtcgggttgaatcctaatcacccgggtacaaggtgcttcattttgctcaggaacgatgataccactgaggacttttcttaccacaagtgtgttcacggtgctgcaaattctatctcacctcaactcggaagttatttgaagaaactatatcatagagcataagatacaacattagttgcaccagtgctcctggcaatatcttgtcctgatcagaccatattaccaacttcttagaaggaactagctgtcacattttaggatgctcaaattgctcaaaacaagtataataacaggctgtaagcaggctgaatgctgatgtggatgagagagaggggggggggaggagagagagagatagcttacagccatcagccggccgtattattagccctgctctcagagaatgaatcagcctaagatcatgtctctccctagcatgtattgaaactgaagggatctgatgctcctctgggattagggtgtatgtcaactcaactcaactcaatgggtctttgggattagggtgtatgtcaactcaactcaactcaattggactatggacggcgggcctgaaagagtcatttactctggtttcatgcctccatctctgtagtctgtagtatactagcctgcgtgtgtttcattttctgcgtgttttctattgtgaagatattctgacaccagaatatgatggcgtgaaataatcattcatttgtttgcaactgttggtggcacaaaatgcaataggtgttaccatcatcgttgtataattgcccctcaggcatgctactgcaatgaaccaatgatcattgaatatttcatgttgatgcaatttgaggtc

SEQ ID NO: 804 - DNA, 3165 bp, Sorghum bicolor
  source 1..3165: mol_type = genomic DNA
ttttcttctggcttgaagagtagatagatacattggactatttactggtatatgtagggatatggaagtaaagctaaaataaagtataccagtttttcaaattcaaccaccttcctctgctgtctgaatgattcatgagttgttatttaagagaagacataacaggatatactaagtcagtgctttagggaggtgtcatttcacactgaaatttattgaaatgcagctaatctatatccttcataagtgacttcaatatagctgacaaatatagcattagcattgaagtcagtcatatgcccttgttggcgcctaggcggacaccctctgactagagactagtcgcgcctaaggcgtcgccattttgaaccttgggttagtggatgacttcctaatttccaaccttgcttgctgctggtctggtgacagtgctgacactaaacctgtgttggctagatgagtgtccgctcatgtttcctgatcatcccagaacttgttgtttataggatattccagctctgtctgtcaaggaagtcaagacagcagatggtgcgattcgattagagttgagcgcacctcataagagacacatgacagaacgttcatggaactttcttgataaatatggatttcatcatggtggatgttctcaatttaggtcactgcttccagaagaggtgatattctcacgagtcattagttatgttttcaagagatttgttttggtagctttgatgaattccaggttgtttgaataacctacggattccttccttcattatttattaggctctgaatatattgaagaaggttcctgatgatactaggagaaagctagctgcacgtggatacattgttcagactgggtatgtgatgaagtaccttccagtacctccgaactgtctatatattccagagttcaccgacgggcagagcatcatgtcatatgtgagttttctagtacacgtatctggtagtttcttctacttcttgttgggtcctatctgatgtccggatttacttgcttctcatatcaggacatttcaatagctttgttgaagaaggttcttcagaaaatagaacaaatcaaaagatcaagatctggttcaccaaacttcgattcacatgatgctgaatcatgcgatttgcagcttgcgattggccagtacatacgtctaaggggcactacaagggtatgtggaaaactagataatttaaacctgtttacatggtgcacggaaaacacagtcacaatttgtttaaaaccactagaattactggaatccctgcacctctgcagtaccttattgtgctttattctgttttatagtgcacactggcatttatttctgatcaacctttttatttctaactgaatttttgtattctccacgataacttttgcatcttattttgaagggccctcaagacaacaccaagcggtttactgttggcagtgctgattcagctgcattgtcaacaaaacagtggttagaaaagatgcggacactgtttatcagcaaagggtcaggtttttcatctcgcagcgttctgacaggtgacccatacattgggttaggtgtagtagggcttccttctgaagtagctaagcggatgacctttgaagaacaggtcacggacataaacattaacagactgcaggaggtggtagacaagggactctgcttgacctacagagatggtcaagcaacttatgctataactgttggatcaaaagggcacacaacacttaaagttggtcaaactatcagtaggagaattgttgatggggatgttgtgttcctcaataggccgcccagcacacataagcattctcttcaagctttctacgcatatgtgcatgatgatcatacagtaaaaatcaatcctctcatgtgcggccccttttctgctgacttcgatggtgattgtgtgcatatatattatccgcaatcgcttgctgcaaaagctgaagccttggagctttttagtgttgaaagacaactaatcagttcccacagtgggaaggttaacctccagctaggtaacgactgtttggtagctatgaaggctatgtctgacagaacagtgttacacaaggaactagcaaaccagctggcaatgtttgtgccattctcacttctggcccctgctgtaatgaagccaattccgtcttggacaatcacacagatagtgcaaggtgcattaccagctaaattgacttgccaaggggacacacacttggttagggacagcacaatcataaagctggatcttgacaaagaatctgttcaggactcattcccagatttggtgtcctccatccttcgtgagaagggtccaagagaggctctgcaatttctgaatgtgctggagccattgttgatggagtttttagttctcggcggtttgagtataagtctgcgggattttaatgttcccaaggctctattggaggaagcacaaaagaacattcagaatcagtcccttgttcttgagcagtcaaggtgttctacgagtcaattcgtagaattacgagtcgaaaacaatttaaaaagtgtcaaacagcagatttcagattatgttgggaaattctctggccttgggttgcttattgatccaaaaaaggaagcctcaatggcaaaagtagtacaacaagttggttttgttggcttgcaactgtaccgtgaaggtaaattgtactcgaggcgcttggtagaggactgcttttcaagctttgtgaataaacactcagccattggagatgagtattcaccagaagcttttggtctggtgcaaagttcatattttcatggtctgaatccgtatgaagaactggtgcatgctatatgtactagagaaactatgatccgctcctctagagggctgtcagaacctggaactttgtttaagaatttaatggccatcttgagggatgtagttatatgttatgatggaactgtgagaaacatttgtagcaattccatcattcaacttaagtatggggaagatgatgaagctgattcttcaagtgctgtacctcctggtgaacctgtgggtgtcttagctgccacagctatctcaaaccctgcatacaaggccgtcttggattcctcccaaagtaacaatgcttcttgggagtcaatgaaggtagtaaagttataa

SEQ ID NO: 805 - DNA, 16449 bp, Sorghum bicolor
  source 1..16449: mol_type = genomic DNA
agtgctactatttatattttgcaaaaatttttggaattaaacaaagccttattttcacctctcaagagtgtactcttagcaacattttgatgtgttcatttatcatcacgcgttgccagtctactcaaacggaaagtgccagttaggccttggccttgtttagttacaaattctttttgcaaaataaacactataacattttcgtttgtatttgataaatattgtctaattatgaactaactaaactcaaaagattcgtctcgctgattacagataaaatgtgtaactagttattttttaatttatatttaatgccgcaagatttgatatgacagaaaatcttaaaaattttataatttttttggggaagtaaacaaggctttattatttcaatttgtgggattacacgatacggtttcgtcatcgagtcaggatagaggttgtgcaggcacaggttcgtggctgggtgggtctccctatgcagcaggatgcagcaggcacaggtttagtggcgcgggtctcgtatatccacactcatcatctcgaaaacgcccgccgcctgaactcgtctcgcccgcggccgatctcctccatccgctcgccggagaggagactgcgctcggtcgagcagcacctggggcccagcgtcctcgcgaccagctctggcgcggcgtccgccctctgcagccccggtgtccgcgcgaccgtcgctgctgtcctacttcgccactcgccaccttggccggagacgagcaagagcaacaccaggttttccttccccttggtcctcccttcctgctgcgcgaagccgtgcgcccaaaccctagcatactattcgtaatcgggatctgaatcttattacaggtgtatatgcttgtattatgactaccaacttcgattgttttgcaaaaattattgggtgtacatgtgtacacccatgtcctttactgggtccgcccattctgagagcctacaaaggacgaatgcagtttattttccatgattttttagggttcagttgaatccctgtgccccctatttcagtttcatttcatccccctggtgtcttttgatgactcgtcagtcggaacttactgtgaaaataagaatcattcagccttgtgctgacgtcttatgtgtgacaattgcccagtttcttcagtttgtcaagtgataggctgaagtttgtatatcagtgttttctgcttggatttctctgatatgcgctatcatttgctccttcgtttttatgcaactcactgtatactctgagatgtataaatgatttaacaccatcctaaggttgatgcacacaactttctggaaagatgcttcatgtatgctaattccccttgtgcctcacgactatatttttcatagatcattaatgccttactggttctggtttcatgatcttaacagtccactctgtcagtctgtctattgagacgattagtttccaactgactaatttggtgattctgtgatacttgatagggaatggaagagctacagaaggacggtgggcaacaatcaaatggctctgattctgaaccagaagctatggtgttggatgacaatggagcgggaaaatcccatagcatggatggaaacagggattctcctgtagatgtcgatgaaggccagtcatctatggatgtggatactaagggaaaaccatccctcaatgatgatgttaatggaaagtcttctgagccatattccaatgctccaattgacctgagtgtggaaagcctagagaagttttgcaaagaagcatcaaggtccttctttgatgaagttggtctgattagccatcagataaattcctacaatgactttgtctcgcatgggcttcaggagctttttgattcgctgggggaagtgattgttgaacctggctatgatccttcaaagaaaggatcaggtggctggaagcatgccatcatcaagtttgggagagtgaagcttgaaaagcctgtgttttggactggcaaggatgaaggttctgttgattttaagccttggcatgctcgtctccagaatatgacatatgcttcaagacttatagtagaagtgaatattcaggtcctgactattttcattcttttacatgcccattacttgttctttatatatgccatggttttcctaagaaaacatgccacctgggtgaactataaaatcagtgacgaggaaaaaaggtttacaagaatgcttgaatatgaatggcatgaccccatgttatttattgtagacaacacaaaattcagtccttttgttataagctaaacccataaaccaatgccttggccaccgagcaatatttgttggcacctgcacacaagcaccaggtgagcaggccctgctcaccttccctctccctcacccctgctccaaggaagaggaagagccctgagctccctcactcactcacgcagcacacacacactcagctttcagacttgaactgaaaactggagaactgaatgagtggcaatgaactgagtttttccattgcaataggtagggtatatatacacaagctatgtacctgctggtacactacttggatggtgactacaccactccaacaactacactacatggcttatctcagccaattcctactcttgtaccagcctaaaccagcccactactctagctggtgtacttctaccaactatggaagactaaatggcctatcgccatacttctacagtggcagccaagagctgaccacttgaacctgccgaatgcaggacaaaagtacaagagggacagcagattatatcttacaatcttcccctaatcctgctgtgtactcttgacctccaccatgccaatcttgctccttagctccaagaaccgaagtcgcccaactggcttagtgaagatgtcagcgagttgtcgaccagtctcaacaaactcgatgacaatctgcttctcctcgacgcaatctcgtaggaagtggaacttcacatcgatgtgtttgcttcggtcgtggagaacaggattctttgccagcgctattgctggctgattgtccactttgagcacaggcggccggggctcaatgcctgtgagctcccccagcagccggcgcatccacaccaactggcatgccgcggtggctgcagcgacatattctgcctcgcaagtcgacagagccaccgtcttctgcttcagcgattgccaggcgacaggtgccgcgccgaggaggatcaacacgcctgaggtgctgcgccgtccatcgacatctcctgccatgtccgcgtcgctgtaagccgcgagctccagcccgcctccaccagaccccccgcctttcgggaagacgagagcctggtccatcgtcccctggatgtagcgcagcacccgcttgactgccatccagtgatcctcccgcgggtcctccatgaaccggcttacatacccgaccgcgaacgcgatgtccggccgagtatgggtgagccagcgcagcccgccgacgatgctccggtagcgcgttgcgtccaccttctccgccgtgctctgcttcgacagcttgatccgctcctccatcggagtcgccgcaggcctgcaattctccatgcccgcccgctccagcaccttgcgcgcgtaggcacgctgccccagcgtgactgccttgcctccctgcttcacctcgatgccgaggtagtagctcagcgcaccgagatcggtcatctggaactttgccgccatctcggttttgaacgatgagatgtccctctcccgcgcaccggtgacgattaagtcatccacgtacaccccgacgacgagttcttccttcccccgtcggcgggtgtacagggcatgctctgttgcacaccgcgtgaacccgagctctgccatggtggcgtcgagcttggagttccacgctcgcggcgcctgccgcaagccgtagagcgccttcctgaggcggagcaccttgtgctcagccccctgtgcgatgaaacctggggcctgcttgacgaagacctcctccgtcaagtcgccgttgagaaaggcggatttgacgtcgaggtggtgaacagcccagtccttggccgccgccatggccaggacgagtcgcaccgactccatgcgcgccactggcgcgaacacctcctcgaaatcgatcccttctcgctgcacgaacccccgagcgacgagccgcgccttgtgcttcaccaccgcgccgtgctcgtccttcttcaccttgtagacccatttgagtccaatcggccggcatccagccggtggatcgaccaactcccaggtccgatttgcctcgatctgccgcatctcctccagcatagcgcgccgccactccggctcgcgctctgctgcagcgaaggtggccggctcttctgtgctcagcatcatgagctcctcctcttcgcccagcagccgtgctgccagtcccggagttgctgcatcaccgataacattgtccacacgacgaaatcgtacctcctcgccgtcgtggaaggcgtccacgaattcggtgacgtctggtggtggagtggcatactccacttgagccgtggtcggagtcctctgttgaggcggggtgccgcccgtcgtggtggggctgggcggctcagcttcccctgctgctggcgcctcgccccctgcttcccctgctccaggggctgctgcttcctccacgactccggttggtgcgtggacttgactggtgataaccagttgctcgacggtgaaggtcccaccgatcccgagcgcgccctcttctcccgccaagtcttcctcctcccacctccacttccccgcttcatcaaacacgacgtcgcgggacactgtcaccctcccggtgactggatcgtagagcatgtaggcttttgatccttcctcgtagccgaggaacaccatcttcgtgctccggtcttcaagcttggtgaggccgggcttggtgttcttcacatgcccaatgcacccaaacgtgcgcatgaatgccacgctcggcttgcggccatgccaagcttcgaacggtgtcttcccgctcagcgccttcgtcggtgctctgttgagaatgaacaccgccgtgctcactgcctctccccagaacgcccccggcattcccttggccttcagcatgcacctcgccatcccgacgatggattgattccggcgttccaccacgccgttttgctgaggtgagtagggcgccgtgagatggcgctccactccctcctccgcgcagtaggtggcgaactccaccgccgtgaactcccctccacggtacgttcgcaacacccgcagtctcctcccagactctgcctcaaccttcgccttgagttgcttgatggcttctgctgcttcgctcttactggtcaggagccgcaaccacatgtagcgaccgtagtcatccaccagcaggaggaaatacctccgccctccatgcgtggccggggtgataggcccgcataggtcaccatgaaccagctcaagcttctccttggcgcggtacttcgcctccttggggaacggcagtctcctctgcttccccaccaggcagctgtcacaaagctcgctggcgtgttggatcttgggcatccccctcaccattgccgccagtctgctcagtgcgtcgaagttcaaatgcccgagccggccatgccatagccacgactcctccgtgcactgtgccgccaggcacactggctgctcgaccttaagatccagcagaaacagccggttcttcgaccttgtgaccttggccagcaaccgccggtcttggtcacggatccgcagcactccgcccttgatcaccacctctgcgcctcgctcgtccaactgcccgaggctgatgatgcttgtcttcggatccagtagacatctgtcagcgcccgatgttctccgttccgacaccggaacaggacagtgcctcggccgcggattgccacccgggagccatcgccgaacttgacgctcccggtggtttcttcatcaagttcggagaaaacagcgcggcttcctgtcatatggttgctcgcgcctgagtcgaggtaccacctctgctccagctcttcgccgtccgctcccaggaggacacgcgcgcgagactcgtcaagttcgacggcctgcggcgcagtcccctgcttcgcctccgcctcccctgcttcgccttcctgcagcgcgcaacactcccccatcaacagagcgcactcgtcgtcgctgtcgtcccgagccaagtgggcctcctccttcttctccggcttcttctccgggcattctcgtgcccagtgccccaccttcccgcagcgcctgcaggcgttggggtcggcgttccttttcttcttcttcttgtccgccggcggcttcccgcgccccttggcgccatctccgccgcggctggtggagccttccccggtccggcgcttgtccttcatgcgcgcggtccactcctcttccgtcaggagtagcttgggcttctccttctctggtgccggcgtgatgcggctctccgctactcgcagctgcccagccacgtcctccagagacaatgtggagatgtccaacatcgtctctatggacatggcgagctgcgaatactttgccggcacggtgcgcagcagcttggtgacgaggtcctcgtcgtccaccttcttcccgtaggtggccagttgcgtggccagggattgaagacgaagagtgaactcctccaccgattctccgggcttgaacttaatgtcgttgagctccctgcggagctgctggattcttgcccgcttggctcggtccgagccgacacgcagcgactccagcatctcccaggcctgcttcgcggtctccttggcgcccagcgcctcgtggtattccgccggcgtcgaggccatgagcgcctccatgactcccacctgggcgtcctcagtgcggtcatcctcctcaatcgcccgccaccacttccgcgcgcgcagcttccacttcatctgcatcgcccactcaccgtagttggtgcgggtgagcatgggccaagagccgctgccaccgaactccttcaccacgcgcacctccacctgcggtggcgccggctggagctgacgctctgcgccctccccgccaccattccggcccgcatcctccgccattgctggtcgatggacctagcacacggcttgtactgctccgataccaattgttggcacctgcacacaagcaccaggtgagcaggccctgctcaccttccctctccctcacccctgctccaaggaagaggaagagccctgagctccctcactcactcacgcagcacacacacactcagctttcagacttgaactgaaaactggagaactgaatgagtggcaatgaactgagtttttccattgcaataggtagggtatatatacacaagctatgtacctgctggtacactacttggatggtgactacaccactccaacaactacactacatggcttatctcagccaattcctactcttgtaccagcctaaaccagcccactactctagctggtgtacttctaccaactatggaagactaaatggcctattgccatacttctacagtggcagccaagagctgaccacttgaacctgccgaatgcaggacaaaagtacaagagggacagcagattatatcttacaatattgacgtgcctgcatttcatttgcttgaatttcccttgcaccctaatcagtaatcagtatagcatagttctaaatgattgaatgttaaataaagcagcctaggactggatgggtgattggtgttttgaggacatccatcagtcatcagcactatagttattcttgttttctccatttgctggattccatttgaagagtctattacatttacttattccttatgtatgatgaagctggagacatgtagtcaccttggtacttgttttggtgtcataatgttactcccatttgcttaggttttatggtcacctgattatctgttatttttcattgtaccaggtttattctttggagaaaagtgacaaatctaaaacaggaaatgatggttttgttcaaaaaagggacttcatgaatgaaactcattggatatttattggcctccttccggttatggtgaaatcaaacttatgtttgttgcatagtctcaaggaaagcgagtgcttgttcgatgcaggtggatactttttggtcaagggaatggagaaggtaataactctatgatatctgttgttaatgtattatgtaggatgatttaattattagctttcaagtgtccttttgttgctgggactatttgggctgtgagctttcttagaacccagtcagcaaatttgtgtaatgtgcattactggtagctcataagagggagaaaaatgtctaaatatgattgtagctatataaacacgacaatctatcgtatcgaagaaaactttggcacaacagtcatttgaggtggtctcctcctggtgccatatgctagcttcttgtgtttaagctatatatataagtctaaacctatgcagcaagaggcagatacggatgtgcggatactgcatttgtctaaaaaaaatccgatacacggatacattttatgatttttaattaaataaataataaaacattaaattataaaagcaatagcgccaaaagaaagttcgagtgttcgacattaccctgcaatattggtgttttcctcttttccaatttttgaatcaaccaaaagtccagataagcgtctgcattcactaatttccaaataaagaagttcataaatcactgtagtaaaacatagaagttcaatgtatgagctctggccttggtcattggcgtcattggcatagaagtatagaacaaagcactagcaccagtactactcgaatttgttggtgatgggtgatgccatttgccatcttgttgcggctgggaaaaattgtggagaaaacacaacagagtgcgctagatcaggaaggtgaacaaggaaaatcaacagaggtcaagaaccgaagaacatgactaaatcgagaatagaaagccaacaagagggttgtcgttggcttgtcactgaattgctgctaggggcctgtgcatgctgccgaggtgggggggggggggatggtggaggttcgtgatcggtgggctggggtcgtcgtctgtgctgcccttgtgtgtgctgcaactgcaatgcgggcatggcggagcttatcggtggcagcggaggtgtgtcgctagtgtggcggaggctcgttgctggcagccagcgggtaggagtgcttgtccgtgctatgttgattcaccggtgcacgggtgtgcgggcagcggcacgatgcagcgaatgagacagaacagtgcgggagtggataggatggagtgtcggaggttacgtattgctggtgcgtatcaacatttgttgaatttattttatttccaatatgctgccgatacgtattggagccatatccttcgcatatccgtatcatagtcacaaagtttctaggtcgatggggtcgaggtacatggtacgatacttgcgagttgcgagagatttttacactttgggtcgaaaatgaacccgtgaacccaggccagggtcgacgaacgcgggtcaagggtcaaaggtgatgaacccgttttatgtgactatgatccgtatcagatacgtatctgataagggatacactgcccatcacacatatccacgcaacacaggtctaaactatgcagcacggatacgatatgtgtatcggtatcagaaggatatggatacggcaatttcctgaaaaaaatccaatacgtggatacgttttactatttaaaaataaaaaagataataacgcattaaaattgataaaacaataaaacattgcaatctacttaaatacttaagttctattattacagaatagcaggtctcaagtctcaactctcaaattctcaaatatagtagtctgaaatataggagagtaataaaaggcatccaggcttgcaattcaggctcgcatcaagttcctgtttcctcatttgtttcattctcatccacaatatcatgccacagatcacccaaaccaaaaggcacagcttgcaattcaggctcatcaagggggagaggtcagccacttcgagaatgccaataccatcaaggcaccaagtgaatcaaaagaatctcctcccacatcccactgtcttgtatgcatcaattcttcttgacagatgcctcagtggggagcaaagaaatcaagcaacaatagagtagattgagaagtgagaacagggaaggggatgaactcacggccgtcatgggagaaggagggttgatggatcgatgtcgcggaggcggagactcgtcgccggcggccggcgagcgggacgaggcatgcgtcaccgcctgagtttctgggaggcggcgcgaggttgcgggcgttccagcgtcgggggcatttggagatagcattgcttgttgttgggctggttcatatccaacatgcatacgtatcgggccacgtactcaataatcacgaaaataataaaaaattggatactctgcagatatcggtcgcgtgcgtatccgatacatgttacgaaccctcagtcacgtatccatgcaacacagggtctaaatgagctgtagtgtgttatttagtcatatcttggagattctaatagacttcaaagttcccgtgataattatttacaggaatgctgacgatctgctgatgacatactcagataccatttcatgatttcactatttcagatacccgattatttgctaagttcatttggagtttccttttgggtgtgactatctgcgttgtagcctttttactgcaaagagaatgccctttgaatcacatatagtatttttctttcattatgtttctattgttgtcatacctgcaggtattcattgctcaagagctaagatgtctaaagaggctctggattattgaccgtccttgctggatgatctcttttatgtctgaaatgaagcgtagacgtatatatattaaactagttgaatctacaaggagtgaagatttcagtgggagcaaaatcatttccatttcctttttgtatgcgacaatgccagtttggttgttgttctttgcacttggaatatcatcagataaggaagcctttgatgtgatagatatgcaagattgcgatgcttctgttatcaacacaatatctgcaactatcaaagaatctgatgaattgtgtgaagggtttcgtaaatcagataaagctcgtcaatatgttgatgagttggtaaaaagttcgagatttcctccagcggagtcctttgatgactatattgctaggtttctctttcctgatattagtggaaatagaaacaaagcacttttcttagggtacatggtgaaatgtctgctaatggcttttactgggaagcgtaaatgtgataataaggatgatttcaggaacaagaggctggacctacctggtgaattgcttggaagggaacttagggcacatcttaggctggcagagaagcgcatggttaaggccattcaaagagatttgaatagtgaccgtgagttacaagatcttgaacgctatatagatgcatcgattgttactaatggtctaagtcgtgccttttccactggttcttggtgccatccctacaaaagagctgaacggtgctcaggaattgttgcgactctaaggagaactaatcctcttcaaatgatgtctgacttgaggaaaacccggcagcgggttgcttatgctgggaaagctggtgatgcaagatatccgtaagtaatttatttttcatcaaccaagtattgcatgtccatcttgtgcttttgtatctcctaacattgagtgacttcaaactaaatccctacatacaggaatccatcgtattggggaaagctgtgttttatgtccactccggatggtgaaaactgtggacttgtgaaaaatctagctgttactgctattgttagctcaagggtggtgcagcccttgattgagagcttcatttcttgtggaatgagtaagctgaatgacattcctactgagcacattcaaagaatggataagatctttttgaatggcaattgggtgggatcttgtaaagattcagcttcatttgtatttcgattgaggtgcatgagacgcagcagtctgattgatcctcaggttccctatctttcccatggctggtcactttctgctttaacttatttacaacctttactaagatgcttggtgtgcaggtttacatatatgtgtagtgttttatttttttagaagagtcacaatgtcctgtcattgattttagaaaagtaaaatttcatctttacgcctgcttgaataataatggttttccttggctccttttcaatcttgatgctctgtcttatatctattacctatttttgaggataaatgttttttgcaatttggttaatgagtgagtataaataggttaaaatcatttcctttgaagtgacctatattagtttgtttattatcaatttcccaaattgtgttgtctttcttttctgtttctgttaactactgagcatttcctgcctatctcgactgctgtgtttgtgtcatgtaattttaggtatccttttctcaatgcataaatgtgaggatgttggttgcttttagttgttgacacctttgtcagtactgcatactaatattccacatcaagatgttctttataatgtttcttatgtttctcgtttcatcttattaggttgaaattaaaagggacaagcaccacaaggaggttcgtgtgttttctgatgctggacgaatcctcagaccccttcttgtggttgagaatcttaaaaaaatcagaaaaccaaaggggcgctcattctctttccaggaattaatgcaacaggaaataattgagttcattggtgttgaagaggaggaagatatacaatgtgcgtggggaatcaggcatttgtttgagagtgaaggagcgatatctagttatactcactgtgaactggatccttcctttcttctgggattaagctgcggtatcattccttttgcaaaccataattttgctcggagggtattataccaatctgaaaaacactcacaacaagctattggttactcaacgacaaatccacacatcagagttgatactctttctcatcaactatattatcctcagaggcctcttttcaaaacagttatagccgactgtcttggcagatcagattatactacttttggaagaaaagatgacttcatgagaccagaatacttcaatggacaaaatgcaattgtagcagtcaatgttcatcaggggtttaaccaagaggattccctggttatgaatagggcttctcttgaacgaggtatgtttaggactgaacacctcaggagctataaggcagatgtagaaaacaaggatggaaccaaacgactgaaattgaaggaaaagatagactttggaaaaacagaaagcaaaagaggacgtgttgacaatcttgatgatgatggcttaccttacattggtgcaagtcttcagaccaatgacatcgttattggaaaagtctcagaatctggagaagaccacagtattaagctgaagcatacagaaaagggaatggttcagaaagtattgctttcagcaaatgatgaagggaagaattttgctgtggttactctaagacaggtaaggccttttttggctgcacctcattccacatgtgttgggaacttgggatgaattgatgtggaaaattagttaatttttcaccccaatctatctcaacacatgtggaatgaggtggatacgagtgcatccaaacaagacctaaatgacatttgtcttagcagagaagtattaacaattaaccaattagtacattccttgaattctggcttcacttgcaagcgtacggaccttatttgataatagaatgctgcattcttctcttgactgttccaccgattgacagaaaccatctgtagctgcatttactgtcagttaagcctgttacctgttttgtgtgcctggcattgttatttaacccaatagttaccttgctctcaagcaattattgttggccttcttgatattccttttttaacccaataagattaatgaattatctatgcctatattcttgccatgcaattaagaggagatcatggtctctcatggatgataagaaagacaagcgtagtgtgcgctcatgggttacttcatcctttatggttaaaataaaacttgttttgactttattacccctcttttcttttacaacacttggcactattaacttttaggatgtaacttcgacacatgcaaatatttctaagtacatatattctttgggtaccattgttggcaactctaaaaatggtaatttcacactattgaaccatatatctaaaaaaagtatagataattagaaaatcaaagctagcaagtgttatgaaacaggggtagtacctttttatggggttcagcactttacatgattccattgatccaccccacgtccccataccccaaaaaagtaacaataataatttggcttctccttgttcttgtcttttacgaaacggatgagcccagataggctgcagctcaactcacccttttccatttctttagattagatttcttcaaacacttaatgtgactattctaattttaggttcggacaccttgccttggagataagttttccagcatgcatggccaaaaaggtgttgttggatttctagaatctcaagagaacttcccatttactcacaaaggtatagtcccggatattgtgataaatccgcatgccttcccgacacgtcaaactcctggacagctgcttgaagctgctctggggaagggaatagcctgcaaaggtacaatgagatatgcgacaccattcaccacagcatcagttgatgttattgcagaacagttgcacaggtaagtgtttcttcttccaacggatgaatagctgcttgccttaattcagtaacccgccccttgcacacgaagcaaatatgagaccctttcaaagggttagcctcttttagttgaactttataattgttaagcttattagtacatcttataagaaccttgtacgtccttaatgcaccctatgctctcaagtcttaactctgttggtactttactgcttattacacatacagaagaagaaaaagaaaggtagggaaataaagtacacacagaatggctggtggctaacctcatattttgtatatttgtcatttgagtaaacatgtactgcattgttcctagtatctcttagtttacagtaatttcacatgtatgtatctttttgtaatcttttgctccaaaatggtggaaacacacaactttccttccccttccccttttatcttgtattactatcagttgatgcttatctttttcttaaccgagacatccatagtggcaccactagatataaagctgtgtgcgctcacacactaataacatgttatcagtgaggatcttactccagataatcaagtatctttgcatgtaatgtatctgagaatgagaatattttagttattttcttgtgttttagacttgttttcttctgtgatttgtttagttgatctccaaaattttatgtatcttgttgcattgcagggctggttattcacgatggggaaccgagaatgtactaaatggccgaactggtgaaagaatgcaatccttgattttcatgggccccaccttttatcagaggctgattcatatgtctgaagataaggtgaaattccgtaatactgggccagtgcaccccctcacgaggcagcctgttgccgacaggaaaaggtttggtggagttaagtttggagaaatggagcgtgattgcctcctcgcccatgggtcagctgccaacctgcatgaacgcctcttcatgcttagtgacttctcccagatgcacatctgccagacatgcgagcgtgtggctaatgttgtcatgaggtctgtctccggaggcaaaaagatccgtggcccctactgcggtttctgcaagtcttcggagaacatagtgaggatcaatgtgccctatggcgcaaagctgctctaccaggaactcttcagcatggggatctgcctcaagtttgataccgaagtctgctagaagctgctctacgcctctaccaggaactcttcagcatggggatctgcctcaagtttgataccgaagtctgctagaacttgtagacctgattgtatccagacatccagttatgtacataacgttaccctatgaggatagaggatatcgtactggcagctatgtgaaaattcctgccgatgtgtgctgctggcatagcaaggatgggcgagtgtgatgtagtgaaacggcactggcaggtgggtatctccaagcaggtgtggggatctacctctgctttgagaataaactctgttgaaactagaaaacctgtagcgtttatgctgtt

SEQ ID NO: 806 - DNA, 11133 bp, Sorghum bicolor
  source 1..11133: mol_type = genomic DNA
ttccgcatcactaccaatacactatgagctctcgtttgattacgagtctaggaagactatgcctagacaggtagattccaagaagttacccgtgacatgtttggattagatcctggtgacttgcgacaatccagttgctcccaggcaatcaaaatctagcgcctggctcagttgcctggcctttttggtttgatttaaaccaataagtaccatctttaaatacagagtatttattattagaaatatttatcctcacaaaaaatattttgataataaatctactaaatgtggaaaacataatgcaactcatttaatttgataataaccatagtaatgttttagagcactagcaaaacaatacactcatccaacttacttggtcagacaataattatcaattttacagacaacttttaggcaacactttttgctagacaaatcgtccagaactccaaccaaacatgctctatattgtacgctatttttcgtctaaattaatagacaaagcgtttgcatctatcgtggtattggtaacaaaagtacacatgcagaagctgaacgcttgccatttggtagtttgattgtttcacccatagacggtggtgacacgttgtgccatagaccactatagaatttagattaacattgaaattatagagtataagtgttctatactataaataaaaattacatttaaaatactattatttagcttattatatttaaatagaccacccttacactaaaccctaattttgccactggtttcaccttttctcgttgccgttggttgggcacactgaacagctaccccgtcctatccgaacctgtgatggatcgcgcacagaagatcacatcacgcgacacgatgttcttgccctccttgatccccgcgaagaggctagttctgccgttcgatgtcccgcatcgcaccatcgacggtcgatctgtctcggcggacaggaaatgctcgtcagaacaagtattacactatatcacagagttaaagacaattaattacatattatttatggtattttgctgatgtgacagcatatttatttaagaaagaggttgaaaaaaataagacttcaaatcttatttaaactacaagtccacattgttcgagataataaataactttagactctatgatagagtctgcattgtgagtgcccttatagcaggctgtaagccagctaaatgctgaggtggaggagagagaagaggagagagtaaaagccggttgtaagcttacaacctcagacacaaaaaccaaaaaaaatctgtaaaacagacaagtggaccatgtattaataatgatgagctaactattatatgatgagtggactgcaaatacttgctctcactgagaccgggacccatagagcactctctgaccactggcccgcctgtcagaagccaccgggcatcgtcgacgccgccggtcgtccccgttaaaccccccgtccccgactcgaggcgattctactttctcccgcaccgcaacaccgccagaaccctccgtccctccctctcccacccactctacgaaggaacaagtgaagcgcgacggcggtcgcgccgcccgccgcctcccaccaccgctggcgccacgctgcctcgccgcaccgccagctgtccgccgaccccgctctccgcgtccgcgtccggcctaccgcagcttccccttcacccaccaggttcggatccaccacccgccgttcgtccgcactttgtaagagtggggaatctgagagcgtaccaaggaagaatgcagtttattttccagaacgaatgcagtttattttccatgatttttagggttcagttgaatccctgtgcctcctatgtcaatttcatcccctggtgtttttgatgactcgtttttcggtagacttgctgtgaaaataaaaccatacagatgggatttctctgttgtgatttgctttatgctgacgttttatctgtggcaatcgtccagtttcttcaattgtccacttgatgatgagccaggctgttgataagtgataggatgatgtttgtatattattgttttctgcttggatttctcttatatgtgctatcacttgctccttggtttttatgcaactcagtgtatactctgggctttataaatgatttaacaccattctaaggttgaggcacacaactctttggaaagatgcttcatgcatgccaattccccttgcgccttatgtccgtatttttcgtagatcattaatgccttagttgttttggtttcatgatcttaacagtccactctgtatggtattatttctgttgagacgattaatttctaattgactgttttgtatttttgtgatacttgataggtataagctgccagtgcttgtgtaatggaagagctacagaaggacagtgggcaaccatcaaatggctctgattctgagccagaagctatggtattggatgacaatggagcaggaaaatcccgtagcatggagggaaacgaggattctcctatagatgccgatgtaggcaaggattctcctatagatgtcaatgaaggccagtcctctatggatgtggatattaaggcaaaatcttctctcaatgatgatgttaatggaaagtcttcttccgagccatattccaatgctccaatcgacatgagtgtggaaagcctagagaaattttgcaaagaagcatcaaggtccttctttgatgaagttggtctgataagccatcagataaattcctacaatgagtttgtctcacatgggctccaggagctttttgattcgctgggggaagtgatcgttgaacctggctatgatccttcaaagaaaggatcaggtggctggaagcatgccatcataaagtttgggagagtgaagcttgaaaagcctgtgttttggaccggcaaagatgaaggttctgttgattttaaaccttggcatgctcgtctccagaatatgacatatgcttcaagacttaaagtagaagtgactattcaggtcctgagtattttcattcttttacatgtccattacttgttctttatatatgccatgattttccataaaaaaatgtgccacctggatgagctataaaatcagtgtcgaggaaaaaaaaagtatagcatcgttctaaatgattgaatagtaaataaagcagcctaggagtggatgggcgattggtgttttgaggacatcccatcagtcgtcagcactatagttattcttgttttctccatttgctcaattccatttaaagggttggttacatttacttattccttatgtatgatgaagctggatacatgtagtgaccttggtacttgttttggtgtcactcacatttgcttagattttatggtcacctgattatctattggttatttttcattgtatcaggtttattctttggagaaaagtgacaaatcgaaaacagggaatgagggttttgttcaaaaaaggaacttcatgaatgaaactcattggatatttattggcctccttccggttatggtgaaatcaaacttatgtttgttgcatagtctcaaggaaagtgagtgcctgtttgatgcaggtggatactttttggtcaagggaatggagaaggtataactctggaatctctgtgttaatgtattatgtaggatgattgaattattaactttcaagtgtccttttgttgctggtatgggactatagggctgtgagctttcttagaacccattcagaaaaattgtgtaatgtgcattactggtatctcataagagggtggaaaatgtccaaatatgattgtagctatgtaaacacaggattctatcgtatctaaggaaactttggcacatcagtcatttgagttggtctcctcctggtgccatgttagcttcttgtgtctaaacctatgcagcatggatacatatatcagtgtcgggcagatatgatatttaattaaataaataataaaaaattaaaattataaaagcaatcgcagccaaaagaaagttcgatattaccctccaatattggtgttttcctattttccaatttttgagtcaaccaaaagtcacgataaacatctccattcactaatttttgaaacaataaagttcataaatcactgtagggaaacatagaagttcaatgtatgagctctgcccttggtcattggtttcattggcatagaagtatagaacgaagcattagcaccagtactactcgaatttgttggtgatgccatttgccatcttgttgcggctgggaaaaatcatggacaaaacacaacagagtgcactagatgaggatggtgaacaaggaaaatcagcagaggtcaagaacttaagaacatgactaattcgagaatagaaagccaacaagagggttgtcgttggctcgtcactgaattgctgctaggggcctgtgcatgctgcgacgtgggggcatggtggagcttcttatcgggggcggcggaggtgcgtcgccagtgtggcggaggctcatcgtcggcagccagtggatgggagcacttgtctttgctgtgtcgatgagctggtgcaccggtgtgcgggtggcgacaccgcgacacgatgcaacgaatgaggcacagaacagcgtgggagtggtgggaatggataaggatggactatgaagtgtcggaggtgtattggtggtctgtcccagatgcgtatcgccggtgcgtaacaacatttgttggatttatttcatttccaatacgctgctgatacgtatcggaggtgtatcctttgcatatcaatatcagatatgtatctgataagggatacactgcccatcacacgtatccatgcaacacaggtctaaactatgcagcacggatacggatacatgtatcggtattggaaggatatggatacggcaattttgtaaaaaaaaaaaatcagtacgcggatacattttactattaaaaaaagataataacacgttaaaactaaaattgataaaacaacaaaacattgcaatctacttaaatacttaagttctattattagttttacagaacagcagttctcaagtctcaaatataggaaagtaataaaaggcattcaggccgagggtgcgggagttccagcgtcagggcaatgggggcttggagatagcattgtttcttgttgggctgggccgtgtccaatgggcacgtactcaaaattcacgaaaataataaaaaaatcggtctaaatgagctgcagtgtgttatttagccatcttggagattctaatagattttcaaagttccagtgataattatttacaggaacgatgcggatctgctgatgacatactcagatactatttcacgatttcagatacctgattatttgctaagttcatttggagtttccttttggggcgtgactatctgagtcatagcctttttactgcaaagagaatgccctttgaatcacatatagtatttttctgtcatctaactatgtttctattgttgttatacctgcaggtattcattgctcaagagcaaagatgtctaaagaggctttgggttagtgatcgtcctttctggatgatctcttttatgcatgaaatcaagcgtagacgtatatatattaaactagttgaatctacaaggagtgaagatttcagtgggagcaaagtcatttccatttcctttttgtatgcgacaatgccagtctggttgttgttctttgcacttggaatatcatcagataaggaagcctttgatgtgatagatatgcaagattgcgatgcttctgttatcaacacgatatctgcaaccatcaaagaatctgatgaactgtgtaaaggctttcgtaaatcagataaagctcgtcaatatgttgatgagttggtaaaaagttcgagatttcctccggcggagtcctttgatgactatgttgctaggtttctctttcctgatattaatggaaataggaacaaagcatttttcttagggtacatggtgaaatgtctgctaatggcttttactgggaagcgtaaatgtgataataaggatgatttcaggaacaagaggctggacctacctggtgaattgcttggaagggaacttagggcgcaacttaggctgttagagaggcgcatggttaaggccattcaaagagatttaaataatgaccgcgagttacaagatcttgaacgttatatagatgcatcgattgttactaatggtctaaatcgtgccttttccactggttcttggtgccatccctacaaaagagctgaacggtgctcaggaattgttgcgactctaagaagaactaatcctcttcaaatgatgtctgacttgaggaaaacccggcagcgggttgcttatgctgggaaagctggtgatgcaagatatccgtaagtatcttatttttcagcaaccaagtattgcatgtccatcttgtgtttttctatctcctaacatggagtgacttaaaactaaacccttacgtacagaaatccatcctattggggaaagctgtgttttctgtccactccggatggtgaaaactgtggacttgtaaaaaatctagctgttactgctattgttagctcaagggtggggcagcccttgattgagagcttcatttcttgtggaatgagtaagctgaatgacattcctacggagcacattcaaagaatggataagatctttttgaatggcaattgggtgggatcttgtaaagattcagcttcatttgtatttcgattgaggtgcatgagacgcagcagtatgattgatcctcaggttctctctctttcccatggctggtcactttctgctttaacttatttgcagcctttactaagatgcttggtgtgcaggttccatacattaaaatgttttgttttagaagagtcctaatttcctgtcattgattttacaaaagtttttcatctttagtatacattgatccatataacttgcttataaagcctgcttgaataataatggttttcctcagttcctttgcaatcttaatgctctgtcttatatctattacctattttttgaggataaatgtttttcacaatttggttaatgattgagtataaataggttaaaatcatttcctttgaagtgaccaagttgttatattagtttgtttattatcaatttcccaagttgtgttctgtgtctttcttttctgtttcagttaaccgctgaacatttcctgcctatctcgactgttgtgtttgagtcatgtagttttaggttgcatccttttctcaatgcactaatgtgaggatgtcggttgtttttagttgttgacacattctcagtactgcatactaatattcaacaccaagatgttctttataatgtttcttgtttcatcttattaggttgaaattaaaagggacaagcaccacaaggaggttcgtgtgttctctgatgcagggagaatcctcagaccccttcttgtggttgagaatcttaataaaatcagaaaaccgaaagggcgttcattctctttccaggaattaatgcaacaagaaataattgagttcattggtgttgaagaggaagaagatatacaatgtgcgtggggaatcaggcatttgtttgagagtgaaggagcgatatctagttatactcactgtgagctggatccttcctttcttatgggattaagctgtggtatcattccttttgcaaaccacaattttgctcggagggtgttgtaccaatctgaaaaacactcgcaacaagctattgggtactcaacgacaaatccacacatcagagttgatactctttctcatcaactttattatcctcagaggcctcttttcaaaacagttatagccgactgtcttggcagatcagattatactgcttttggaagaaaagatgactacacgagaccagaatattttaatggacaaaatgcaatcgtagcagtgaatgttcatcaggggtttaaccaagaggattccctggttatgaatagggcttctcttgaacgaggtatgtttaggactgaacacctcaggagctataagacagatgtagaaaacaaggatggaaccaaacgattgaaattgaaggaaaagatagactttggaaaaacagaaagcaaaagagggcgtgttgacaatcttgatgatgatggcttaccttacattggtgcaagtcttcagaccaatgacatcgtcattggaaaagtctcagaatctggagaagaccacagtattaagctgaagcatacagaaaagggaatggttcagaaagtattgctttcagcaaatgatgaagggaagaattttgctgttgttactttaagacaggtaagccttcttttgctgctcttcattccacacgtgttgggaacttgggatgaattggggtggaaataaggtggatatgagtgcagccaaacaagacctaaatgacatttgtcttagcaaagaagtattaaccattaaccaattagtacgttccttgaattctggcttcactagcgagcgtacggaccttatttgacaatagaatgctgcattcttctcttgactgttccaccgattgacataaaccatctgtagctgcattggctgtcaattaagcatgttgcctgttttgtgtgcctggcatttttatttaacccagtagttaccttgctcttgggtgattattgttggtcttattgacattccttttttaacccaaaaagattaatgaattatctatgcctatattcttgccatgcaattaagaggagatcatggatgataagaaatacaagcatcagtgtgtgctcatggatacttcatccttcatggttaaaataaaacttggttcgactttattacttcttttcttttacaacacttggcactattagcttttaggatgtaacttaaacacacgctaatatttctaagtacatatattctttgtgtaccaatgttggcaattcttacaatggtaattttacactattgagccatatatctaaaaacccattgataattagaaaatcaatgctgacaagttttatgaaacaggggtagtgcctttttatggggttcaccggttcagcactttacatgattgcactgatccaccccatgtcccatactccaaaaaagtaataataagaatttggcttctccttgttcttgacttttaggacatggatgagcccagataggctgctggcttggttgggccagcagctcaactcttttccatttccttagattccttccaacacttataacgtgactattctgattttctttgcttccccatccccaccttcacatttataccacatgttactttttattgaccatatgaagctttctttgttgatttgattttaggttcggacaccttgccttggagataagttttccagcatgcatggccaaaaaggtgttgttggttttctagaatctcaagagaacttcccatttactcacgaaggtatagtcccagatattgtgataaatccacatgccttcccaacacgtcaaactcccggacaactgcttgaagctgctctggggaagggaatagcctgcaaaggtacaatgagatatgcaacaccattcaccacagcatctgttgacgttattgcagagcagttgcacaagtaagtgtttcttcttgtaacggatgaatagctgcttgccttaattcagaccctttcaaagggttgagcattttctagcctcttttagttgaactttgtaatcgttaagcttactagtacatcttataacaaccttgtacgtcattaatgcaccctatgctctcaagtcttaactctgttagtacttcactgcttattacacatacagaagaagaaaaggaaaaataaatgtagggaaataaaatgcacatgcacagaatggctggtggctaacctcgcattttgtatattggtcacttgagtaaacatgtattgcattgttcttagtatcccttaggttacagtaatttcacatgtatgtattttttttgtaatcttttgctccaaaatggtggaagcacacaatttcctttccctttcccttttaacttgtattactatcagttgatgcttatctttttcttaactgagacatccatagtggcacctcaagtagaagatataaagctgagtgtgctcacacactaacatgttatcagtgaggatcttacttcagataatcaagtaactttgcatggaatgtatctgagaatgaaaatattttagttattttcttgcgttgtagacttgttttcttctgtgacttgtttagttgatttccaaaattttatgtatcttgttgcatcgcagggctggttattcacggtggggagctgagaatgttctaaatggccgaactggtgaaagaatgcaatccttggttttcatgggtcctaccttttaccagaggctgattcatatgtccgaagataaggtgaaattccgtaacactgggccggtgcaccccctcacgaggcagcctgttgctgacaggaaaaggtttggcggagttaagtttggagaaatggagcgtgattgcctcctcgcccacgggtcagctgccaacctgcatgagcgcctcttcatgcttagtgacttctcccagatgcacatctgccagacatgcgagcgtgtggccaatgttgtcatgaggtctgttcctggaggcaaaaagatccgtggcccctactgcggcttctgcaagtcttcggagaacatagtgaggatcaatgtgccctatggcgcgaagctgctctaccaggaactcttcagcatggggatctgcctcaagtttgacaccgaagtctgctaggaacttgtagacctgcttgtatccagacatccagttatgtacataaagttagcctatgaggatatcgtactgggctactggcagctatgtgaaaactcgtgccgatgtgtgatgctggcatagcaaaggatgggcgagtctgatggagtgcaacggcactggcaggtgggtttctccaacccgatgtggggatctaccactgctctgctttgaggataaactctgttgaaactagaaaccttgtagcgtttatgtgctgtttcgccctgctcgtctgataaactatgctcaagtgaatgaacacttgtttcctgtttcttgcttg

SEQ ID NO: 807 - DNA, 8584 bp, Sorghum bicolor
  source 1..8584: mol_type = genomic DNA
atggctgtttaagtgaccatttagaccgacacctcacgataatactgagtttgttcacttgtttgaaaatctatagttaaaattattattcgccaatttattatgaaagaaaaatactgctaaccgagcgggaccactacccctaatccccatcgccaagcctttggtaagcggcccctaatccctaatggctccgtcggatgcaaatcagaggtgcccagagcagtgaaggagacactgaccggtgggacccagctaaagcgaacggcctgccaaaacaggggctcacgagaaaacagagagccgccgtgctgatcctacagtaccataaagcacactcctctcctcggtcgcaagaaacgcagcgccgcggaaaaccccaaccggcgccgtcgcctgcgcccgcgcccgcgcccggcgcgccgtagggtttcccctcgcctcgccgccggcgatcgccggtgcgcaaggtacgcctctccgccctccgcccaattccgggcctcgttgccaccgccatctcgcgcccgccccgttccgcgagcgcaatgcggcgtttcctctgctcctggactgcaggactggctcgctagctcgcggcctggactgctgcacgcgtctctctcttttttttttcgtttctttgtttcgttcggcggcgagggctttgctttggagcccgtgccccctcgccgccggcagcgcgtggttttggcgcttcgagcattgacgtggccccgcctcatgtgggcaccccgcccatgttcttgttatctgtgtgcgtctcatgaccgggctggggttttgtgctgctagtgcggtgctgaattgtggggggttttctggtgttggtgggtgccccgtgatcgttgatcgggacccgtggtggtggcgagccagccctcttctgatttctaaatcccaagacaagatgcaaggttgcgcgaacttgccatacgtgatggtgtgctgggcctgcctgaccaaatcgccattagaaaaggaccagagagggagacagtgggagtgaaatggtggattttgttgaaaatcttcttgttttttttaaaaaaaaattgggcgtgattggtactgttatgcctgtaaggtgctccatttaggtagaattctgtgaaatggatggatgtctgatgtgtcaattttttataaaggcggcatcgttgcgcgtgcatctgcctgataaattatctgattgctttcctttttgtggaatgctacgtggagccctgggtgcacatcttgtactgattttatcttttggttaagaaattgaaaagttgcgctgttgcacaaattgtgtgtgatttcagtgtttgttgctgaatgccttgtggatgctcatgttctgctttctgatcttctgatttcaaagttgtgcatttctatgatgactgtgctcattatgttgtttcccttttctattgtataaaggcagggattttgttgacaccgagtgccagctgcctgttgtttagcaacgcgggaaccacaaatggatggtgatcagtcaactgttgtcttagatactgatatgatggattgcctgaatttcgatggctatggagatgttgaagatccccgcaaggagggtgcaaaaggggagcggcagccttctggcaaagttgatgaactgcagtctactatggatgtcgatttgacatgcatagcttatgtggaagatgaagggaatgaaaaacagaatgctatggatgtggatttgaaagaaatactgcctgaggaagatgaagggaaaggaaaggcttcttcagacataccctcacatgtaccagttgattttgatgttgcaagcctcgagaagttttgcagagaagcatcaagatcatttttcagtgcaactggactagttagccatcagattaactcatacaatcaatttgtctcccatggactccaagacctctttgattctcttggggaaatcactgtggagcctgattatgacccttcaaataaaagtggtgcttggaaacatgccactataaaatttggtagggttgagcttagtgagccagtgtttatggttgacaaccttgaccttgaacagcaagatctcaaatttaagccaagacatgcccgcctccagcggatgacatatgcgtctaggatgaatgtagaaatgactgctcaggtcaggatgctcctaattcatgttacatatcaagtaaacaataggggtaaaatatactgtacctgctaagaaagaactaaaaatgttgttttcttattctcataactagtatggatgttgcggtcaaaaaataactagtatggatgttaaatgtgaccaatcagtcttttcttatatttcacaaatgacatggaagctagtgagattaagcacttctccagttcatttataactttgcttttgatggcacaatagccataatgatgtcccttatatttcccccattactcagcctgcaaaactcatgtagactttgaatgtagctattgcactgtgccttggcattctgcttgtagtattgccttctccctgtttattaagcagcagatgtgatttaaatttactctgccatctgtaatcaagttatgaccttgatatgtgtatcaataagatttctactgatattttaccttctgatcaattactgttttgactttatcaggtttatatactcgacaaaagtgacaaagccaagactggtaaggatacacatgttcatagaagagagataatgacagaaactaaacaagtcagcatgggattgttacctgtgatggtgaagtcaaatttgtgctggctgcataaacttcaagaaagtgattgccagtttgattttggtggctactttttgatcaaaggaacagagaaggtactgcctgacatgatccatgctgctcattcaattctcagaaaatgtatttcacaaagatccattgcactatgcattcttatagattttgatggtactatatattatgtatcaaatgttagtcagaacaaacgaggttttattgtttttttagggtgaggtttcatggttcacaatatatgtgacgactctatatggcactgctatgcaattgccctacatgcttactatcttgcccacctttcttaatagtttaagctttggcctttggtgaactaattagtgcatgaaactcaatatgttgtcagaaacaaaggttttgagttgagacctggctatcccaagtttcataaagggtgactgcagctcacttctagtgcacaccttagtcttgagggtacctagccatgagggaagtattgctgtgttacttgccttgccgaatacttaagagagagagagagagagagagagagagagagagagagagagagatgagggagactatcctggcactgccatacatatgttttgtgaaatttcaggctaactcaaatggagtttacaaaatttagcttggaaagtgctgtgataagtattatatgcatgtggccaaagttcaaatcaaatatttatatagtaagacggcggtgcttcatatttatgcatggaaaatgttctgtaacgttgtcaagaaattttgcagttaacaaattacaattgaagttaagaaagtactccctccgtataggattcagaagtcgttttggacaaggtttgggtcaaacattgggaatataaatcattactaacttttaaattgttgagtttgcaaatgtgaaaattatataaatagatttgtcttgaaaaatactttcataaaagtatacatatattattttgtcctaaatatttttataaaaataagaggtcaaagttgtgttttggagaccgtgtcgctgtcctaaacgacttctaaatcctatacggatggagtattagccgtttgatattgaatatgtttgacaccatgtctgggtgaagcacatctcattatgattgctttaaattctgcaggtattcattgctgaagagcaaagatttttatcaaggatttggatcacagactaccccagttgggatgcaagttacctgtctcaaatcaaaagagaaaagatcaatataaaacttgttccgtccaaacgcaatgaaagctgcaaagtcataaccatttacttcatgggtacgattataccaatttgggtagtattttttgcacttggtgtatcgtcagacaaggaagcttttgatatgattgatatcctagactgtgatgcttccatagtcaacataatatcatcaactattaaagaatctcatgaagaatttgaaggcttccgcgctccaggtagagcctgtcaatatgttgataagctgatcagaaaatcaaagtttccgcccaaagaatcctttgatgagtatgtttgtaggtatatgtttcctagtgtcaatggggttaggagcaaggcacttttcttgggttacatggtaaaatgtctgctaatggcatactctggcaatcgaaaatgtgataataaggatgatttccgtaacaagaggctaggtctcgcctgccaattgcttcggagagaactctggactcatattaagagagcagaatggcgcatggttaagctcatgcagagagatttgagcaatgatggcaacttgcaagaccttaggcgttatgtggatgcgtcaattattaccaatggattgaatcgggctttctccactggttcttggcggcatccttatctaaaagcaaggtgttcaggggttgtagcaacccttcggagaacaaatccacttcaaatgatgtctgatctgaggaagacgcgacagtgggttgcgtattctggagcggttggagatgcaagatacccgtaagttccctgttcctttgtacaaaaaaatgatgcatgcctactctcttccttttccaatatccatgtgcagactgactttcttaatgaaacacgggccacaggtctcgttcgcgaaaaaaatgtgcaaactgactttccttttgcaggaatccatccttctggggaaaattgtgttttttgtccactccggatggtgaaaaatgtggatttgtgaaaaaccttgctgttactgctgtggttagctctgtagtgaggaaaccattgattgatacatttgtttcttgtggaatgaagaaactggacgatatttcactacaagatatttctgggaaagacaggatcttcttgaatggaagcttgcttggagtatgtgcagacccacatgaattgactttgcgtttaagaagtttgaggcgtagcaagctaattgatcctcaggtctgctcagtttccatatctgtcaaactaacgctcaattgtcttgaacctcagttttcagatccaggatagtgtcttactcccgttcgtggtctttgaaaactctcctaaaccattattcatactttcaaatttttttggggatatattttaccttgcaccgtcatgagtcctgttaccttcatgatatcgtgatagatttcgctgcttagtaagttattgactactgaaagttgtttcttcagtatagctgtgctggtgtatctagtggtttaaaaattttcagagcaattatcaaccaacctttaatatcgtactcactttagttatcttgtgatgagtcgatactcgataccattctaatattctcttgctcattactagttttcctttgattctttcaaaaaaaaaagttttctttacgtaatctcaaaaggagatctgaaatttcatgctaatggaattctgaactgaacttgctttattaccttatgcatttggtgtatgtttatgaatattcagtattatattttctgccaaaaggtggaatatggttgttttgttacatgtactatttctgcttcactggaatacctcaaagtacatatgttgcaacaagctggtagtaatacagttacttttcctattctgaacttgaataggttgaaatcaaaagggacaagcaccataaagaagttcgtgtactttgtgatccaggcagaattctaagaccacttcttgtagttgaaaatctaagaagaatcacaagaccaaaagatggactatactcttttcaggaacttatagatcaaaacatagttgaactgattggtgttgaagaagaggaggatatccaatgtgcgtctggaattagacatctattctcaggggagaaagaagacaggtcttctggctatactcattgtgaacttgatccttctttcttgctagggttgagttgcagtctcattccctttgccaaccatgataatggtaagagggttctgatgcaagctgaaaaaatatcacagcaggctattggctactcccctacaaattctcacactaggctcgacaccctttcacatcaaatcttctatccacaaagacccttgtttaaaactgtggtgtcctatggtcttggaaaggcagagacagcctacagctttggacgaaaagatgactttaatacaccagaatatttcaatggccaaaatgcaatagtctcaatcaatgttcatcagggattcaaccaagaagattctctggtcctgaatagggcctctttagagcgtggcatgtttcgtacactacatttaaagagctataaagcacaagtcgaaaacaaagagatcacaaggcgtctcaaacacagggaaagtatcaattttggtaaagtgcaaagcaagagggggaaggttgacagtctggacagtgagggtttaccatatgttggagcaagtcttcaaagtggtgacattgtcattggaaaggtctcagagtctggtgaagatcatagtgccaaactgatgcatactgagaaagggatggtggataaggtagttctttcagcgaatgatgatggggtgaactttgcaactgttactctaagacaggtgagtaataaatctttgcaagattattctgcactgtttttcgtggcccatgtttgcatgcagtggcattttccttacatagtacagtagagcatggcattatccttacatagtacagagagaatggcattattctctgctatttggctgatttgctttcctgtcttaaggaataactcagaaaggttctatgtttttctcatcttgtgcatgtctgttctccttatgatttaggaaatgatagatggcattctccttgcatttttgtcttgattatttagtgctctgaatctctgatatcacctcaggtgtcaatgatatataaaacatttagtttgtaatttgcaccatttcataacaatgcttatgctcttacttgtcttgcttgctacaagttatgtatgcccacttgtcagtctccctagtgattaacctaataatcgtttcagtctcgctcgccatgcgttggagacaagtttgccagcatgcatggacaaaaaggagtggttggcctattggattcccaggagaatttcccatttacttgccaagggatagttccagacatcgtcataaacccacatggttttccaactcgtcaaactcctggtcagttgcttgaagctgctctggggaaggggattgccatgggtgggaaggtcaggtatgcaacaccgttcaccactccaaccgtggacgtgatcaccgaacagctgcacaagtaagttctatttacatgacggattcctttctcacatttgtactttaattcgcccttgcacacatctggggaaaactatagacaggatactggtaactgaattgcagcacatggcatctcatgtcaaggttctttgttatggctttagcaagtgctcagcttgccctctcattgcaagttttacaggaacatgcaatgcattttcatggtgtatttatcaatgaaaatgcactaattattaaatatgcatatatgtgaggctggtcagccattcttatggcacatagctgttctctcatgtttctgtaccttgtggatttgctttgcagggctgggttttcaaggtggggcgaggagagcgtcctgaacgggcagaccggcgagaggatgaagtccctggtgttcatgggaccgaccttctaccagcggctggtgcacatggccgaggacaaggtgaagttccggaacacggggccagtgcacccggtgacgcggcagccggtggaggacaagaagcggttcggcggcgtcaagttcggggagatggagcgcgactgcatgctcgcccacggcgccgccgccaacctccacgagcggctcttcacgctcagcgacttctcgcagatgcacatctgccaggcctgccagcgggtggccaacgtgatcatgaggcccgccgagggcggcagcaagaaggtgcacggcccctactgcatgttctgccgctccgcggagcgcatcgtccgcgtcaacgtgccctacggctccaagctgctgtaccaggagctcttctgcatgggcatctgcctcaagtttgacaccgagatccgctagaacaacgccatgccatttcatcagcccgtctctttttgaagccgtagactacatgcatttgcaattgcaacttggttgcctaggatattggtgattgaagtcgaccgtagactacatacatttttgtaactttgttgcctaggaaga

SEQ ID NO: 808 - DNA, 7174 bp, Sorghum bicolor
  source 1..7174: mol_type = genomic DNA
caaaaaaatttcgcatctaaacaaggcccgggcggtttttgggcaaggtgcgagactagctcttgttttcactcaaaaactaaaaacttttcaagatttcatgtcacatcaaatcttgcggcatatggagtattaaatatagacaaaaatagaaaactaattacacagtttatccgtaaatcatgagacgaatcttttaaaccttgttactccatgattggataatatttgtcaaataaaaacaaaaatactacagtgtcaaaattcaaaaacttttcgtatctaaacaaggcctaggccgtgtttagttcatgaaccaaaaaatttcggaacaccgtaacacttttgtttgttttttataattattgtccaaccatggactaactaggctcaaaagattcatctcataaattttgacctaattgtgcaattagtttttatttttatctatatttaatactttatgtatgcgtctaaagatttgatatgatgagaaatattaaatttttttggagttttaggtggaagtaaacaaagcccacgtgcagaagcgctagcgagttctctttccagctctcactcttcttcacgttgaattctcaacacaggccttatttagtttaaattttttttagttttcgctactatagcattttcgtttgtatttgacaaacattatctaattatggactaactaggctcaaaagattcgtctcctaaattacaggcaaactgtgtaattagtttttgttttcgtttatatttaatgcttcatgtatgtgtgcaaacattcgatgtgacagagaattttgaaaatttttaggtttttggtggaactaaacaagggcacggtactcaaatagctagcacaatcgtcttgttgggacgtcgatagtatccaacaaattaggtattgtttagagcaactccaagatactctctaaatcattctctaaatatgaagaatagagattttagtgaaaaactattctccaacagtttgtctaaatgattatgcaaatatagtcatcttctattccgtatttttcgctagctataaataaaagacgagaatgactctctagagtgcgccatgagagataaaaaagctattggacagtgaagaatatagaaaacgatttttataaaaatgattctctaaatgatgatttagagagcgagatttgctaagactcttgaagatgctcttaaatactaaaagtttttaaagttatacactgcaacatttttatgtctatatttaatgttttatgtatgcgttcaaagattcaatgggacgaagaattgtgtaatcttttaaaattttaaaggcatctaaataaggcactagcggagtcggttgagcaatgaaattctgaattcctataaagaaaaaaaaacgaaaaagaaagaagaaaccctcttttgggggcacaaaacccccggccgtgacagcctgacagggatcccggtcctccagctccacgcccgcccgccactatgtcgatggcggctcccgcgccgggcgccacggccacggtgcgggtagccaacatcccggcctcggccatcgccgccgagctgctcgccttctttgactccgccgtcaccaccaccggcgcggccttcgcttgcgagatcgccgccgcccaccgcggctggctcagccgcggccacggctccgtccagtttgactcctccgccgccgccatccatgccatcgacctcgcctcctcgggccgcctgccccctttcctcggctcctgcctctccgtctcccccgcccacgccgacctcctgccccgcgcgcctgacctctccctccgcgccgccgacgcgggcctcattctaggcaaccgcgtcgccgagcgagagctggaggcggcctactcctgggacggcgtgcgggccgaggtcatcccgaggaagcggcgtgtggacctctacctgaagcaggattcccggagctacaagcttgaggttctctttgaggacatcagggagtgctttgggtgccaccttgatgggacgggcgccatcttgctgcaggtgagcagcttagaccgtgctattcgcttcgatgcacaaagttccaaaaccttgatgcgcccttatatgaattaaagtgtgcctgtttcgaattaatagttgacacgcagatatctgattgatatacactgtcatcactcatcaaccctcattttcggtcagtagccagggcccaagagattcacccagtgattgtgatagagtagcttattatgggtagagttgcaagtcaacaagtaaatctacagatactttcagaccaaaggcaattggcccagctttattgaaagcctaagaggagttttactggtgttaccaattaccagtttattacaaaagacaagcctttgataactctactcgactttgacttctctctggacggaacacctctgaacaaaccttcttaagcaactatcagtgaaagaacctcaactactgtcctcagaactcaggaaatgaaaagaactacaccaaatgtccagcaaaaggcagccttgcagaagagttcttttgacagttgagcgatcatctccacatcaacatataattgaatttctattctggcctaacagcccagcagaatgggagcatacccaagtgcgttgcagcctgcagatagagctttcttcttcctctagtgctgcacagaaggatatttttgcattcttctatggcctgctagagtcctctatgtctgctatcgcatatgttgtgtagcagcattcaaatcaatcacactataggttttcatatgattcatttactgcataatctagccattttccattttgagtaattactcaacgacttgagatatgcacaataaatgtaatcctcataagggataagaataagatcttttactttgaagtttgaaactgatcaattttttttccacctgagaaattcccatttccattaaaatattaaaggaaataaatagtttgtgagataaaagacagaaataaggaaagaagaagagtttaaaggccttagagcctgcagccaaagctacaaaaactaaagccaaaagctctgactaagagcaccgactacagagatttaacctaccaaccttctccatctctcagaaagtttcagcagaaaggacataacaggagtatcagcagcaggatagaaatatatcaattacagaaaccaaaaaagacggtttctccttcagtgtgatagccttttgagattcacagcctgtccttaagccggagcattgccttgcccatcagggtctccatgaaactgatcaattaacttcatatttatgcaagcatactcgagtttcctctgcatgttatttgaagcatgtctttttcatcatatattgagagtgtaagctgtttaagatttattaacttaatacattgaggtagattttacaaatgctattctatcaattctcctgttaatattaagctgccctgttgaatacatagttatagctgcaatgatatagatttaatgcttgtcatatttcttcgactatcaatttgtttcagctgcaatgttcttagggcatcttttttaatgaatctgaagctactcttctgataaaattaatattatccttgcttcagctgacttatgcaccaagaatatacactgcaatttctgggtcaacagttaaatcgaggtttacagatgaccgctttcatgcatgcaaggaggatgccaaatttgcatgggtcagagcactagattttacacctaataactctttcggcgagtgttccactcttgtcctgaaactgagcaaaggtgtaccagtatcagatattcttgaaagtttacccttctcaggagaattagaggaattggccatttcttcgatgcttgcatttggctcctcctccaatgtggttcctcttgttgactgcccgaatggcttttccgtgccttatgaagttcttttccgtctgaactctcttgttcacatggggaagctagttgccaggcatgttaatgctgatctgtttaaagtccttgaagagctgtcaattgatactttaaggagaatatttgagaaaatgagcaaattaaaatctacctgctatgaacctttgcaattcatcagacatgaggctcatagcatgagtaagagcaagaaagcctttttgtccaacaagaaggacggtggaaaattgatgaggtgttacagaattcacatcacaccatcaaaaatatactgcttgggacctgaggaagaagtttcaaattacgtggttaagtaccactctgagtatgcttctgactttgctcgagttacttttgttgatgaagactggagcaagctttctcccaatgcattatcagctagaactgaacaaggtttcttttctacacctttgaaaactggcctgtatcatcgtattctctccattctaaaggaaggattttgcattggcccaaaaaaatatgaatttttggccttttcagcaagtcaacttcgtggtaattctgtttggatgtttgcttcaaataattctttgactgctgagagtataaggaggtggatgggccacttcgaagatatccgttcagtctccaagtgtgcagctagaatgggccaactgtttagctcctccaggcaaacatttgaaatctcatcatatgatgtagaagtaattccagatattgaagtcacaagtgatggcactaaatatatattttcagatggtatcgggaagatttctactagatttgccagacagattgccaagttatttggattagaccctgctcaccctccttctgcttttcaaataaggtatgggggctataaaggagtcatcactattgaccctacttcctttttcaacctttctctacgacctagtatgaagaagtttgagtcgaagagcactatgctgaacattacaaattggagcaagtctcagccatgttacgtgaaccgtgaaattatttctcttctttcgacattggggataaaggatgaagtatttgaatcgatgcaacaagatgacatgcacgaatcagacggaatgctaacaaataaagaagccgctttgtctgtcctagggaaaattggtggtgctgataccaagacagcttctgagatggtgctgcaaggctatgaaccaagttcagagccttacctgttaatgattcttaaagcccatcgggctaataggctgaccgacataagaactaggtgtaagattcatgtccagaaaggccgtgttcttattggttgtttggatgaaacctgcacattagactatggccaagtttacatcagaattacaaagaatcgcaaggagcagaagtacagtgaacagccattcttttgcaatgatgatggcaaaacagctgtaattgttggaaaagttgcagtcacaaaaaacccatgtctccatcctggtgatgtcagagtacttgaagctgtatatgaccctgcattggatgctaggggtcttattgattgtgttgtatttcctcagagaggggaaaggtatgtttgctattctgaatctgaaaaatgacttatctttagaatgtggagttcaatttctctgtccatggctgtgaagcagcctgtctactgaactaagacactgtatctgtctctgctagcaatgttatccatgttatgttgatcttgtagtttacaactaaccatttggattaatgttgtcaatgcttgctctatccttgaaatcttcaaattaattaggcctcatccaaatgaatgctcgggtggcgatttggatggcgacctcttctttattacttgggatgacaaactgattccggagaaggttgatgcacctatggactacactgcaacgaggccacgcataatggaccatgctgttacactcgaggtacactccatactcgtgagtgtctttcattcgctcatttttctggattatatatgtatatactatggttgatttgctgttgttcttattcggttaataggatttctatagtctcaacatatcagtttataagcgatctttcccctgagactattgattcaggcattttaatgataatgattttggagctaaggatccttgcatgtttctaaaatgtgtgtatgcatttaggattaacttcatgaaacaggtgctgatagggcaataatgagcatatagaactcgctgttaagaccacattttagtccagtcagcatggtattaagatggtatgtgaattatgctcgccgtgaacattcagcaaatgcctgcatatttcgccatcttgcgtggttattctcgcttgagcaaaatgttacaaatgaacatctgcatgcaaatgcttgcaggaaattcagaagcacttcgtcaattacatgataaatgacgccctcggtgttatctccaccgcccacttgatccacgcagaccgtaatccgctgaaagctcgcagccccgagtgcctccagctggccgctctgcactccatggcggtcgactttgccaagacgggagctccagccgagatgcccgtggcgctgaggccccgggagttcccggacttcatggaacggtgggagaggccaatgtacgtctccaccagcgtcctcggcaagctctaccgcgcagccctgcgccatgaggagaacgcagaagcgctcctgcctgcgggcccaccgcgctgcgtgtacgacccggacctcgaggtcgctggtttcgacaagttcctggacaccgcggaggagcagtacgaggtgtacgccgagaagctgggcaccctgatgacatactactccgcggagcacgaggacgagatcctgacgggcaacatccggaacaagctggtgtatctgcggcgggacaacaagcgctacttcgagatgaaggaccggatcatcgccgccgtcgacgccctgcacgctgaggtgagggggtggctcagggctcgcaaggaggatgacgcgtccaagttggcgtcggcgtggtaccacgtgacgtaccacccggaccgccgcggcgagaagcggttctggagcttcccgtgggtcgcctgcgacaccctgctggcgatcaaggcggcgcgtaggtgccggaagcgggtggaagacgccgctgcgcccatggactgcgacgcctcctagacggaggtgccactgtcaaag

SEQ ID NO: 809 - DNA, 8168 bp, Sorghum bicolor
  source 1..8168: mol_type = genomic DNA
ctatgcatcaaagaattcttagtgcgatgtgatacgaagctcttgtttgcattgtagtctttggaaatatcttccaaaagtttgatcggttctattcactagatctttcctagtattcaaccaatctaacataattaatccatcctccttattaaactttttttgctttttcgttttgggcctggcaccataagtacttgcagcaacaatagaagagagcacatcaaattggctgaacaatccatccaaatacagatcatcattgttgctattcgccatatccatccaaatacagatcaccattgtcgctattcgccgtatcaatctaggaacttggattatccatgatctatatttacattcaacaaacaataagttacaaatacgccatatcacgacacgtatgaatgtgttgttcatcaaaaaaagaagagaaatttcatctgctttcggccgattgcctatgacaaagctatcatacaagaggcaacaacactattgaggcgatgtggaaccaactagtgcccagtagggcaagggagctccaagcgactggctgaacatagctatagattcaatggcggcgtgcagatgtgttgttgctctgttatacaagacagaagtgaggtgaaggtgagtccgtaccaatggtgccagactaaaagaggggaggagtgggggtggggggagaacagatgcccgctaaaaccaacaatatatctcgtgcaaaaaagaaagttgctcacgcgagaagtaacacagaaacaaagccagagaggcggaatactaagttctcagtttcaaaaactgatcgctcgcacgagatgtattgcgaaaaccagcccacaaaggagggatataaagttctctcgactatagaaacatatgagttggagatattattttacaaatttttatttttaataagcttttttatcaaactatcaaagagaactttttttggctaaaaaatcaagatagataattgttttataaaactcctagagatgcttaagaaaaaaacgagatagctatttcagaatttgggcctgtcttttaatttgcctgctctgatatcacaaatggtgctataggcatcaatacaatcaaacttctccttttgctggtacataccttttcttcaggacattaagtatgctgatatagatattaaatatattgatatcacactgttttttaaaaacactgtagttgtattaaaaattgagacatgaaactccacaccgacctcagtggaaaacgataaatggctgaagaaaaagagaggccattgaccgaccaaccacaacaacacacactttgcattgcacccatccgttcctcgttacgcttaaaaatttaaaaccccttcagattccattaattaaaccaaatcatcaaccccctcaaaaaccccgtcgggtcggcccctcccaaaaagaccaatcgctctctcctccggcatccaccacccaacggagccgcggcaaccgccacaccatgggatcgctgcggggcgcggcagccccgtccccggcgccgcgcgcgggcgacctggtgaccacgcaggttagcctgggcggatttgacgccaccgtcaaggcgctcgatcttgccgactttctcgagttgaaggcgggcttggtctggcgctgccgcgtcaagacctcctggaccccgccggacgcctatcccgacttccttctccccaccgtcacctccgccgccgcgcagccgccacagtacgatcgcgtgcctccgcacgccttcgtccactttgcgcgcccggagggcgcgcgcgccgccgccgacgcagcggggcggtccgagctcatcctctccgggaaacccctgcgcgccgcctccgcgcaggagagctcccttcgggcctcccgccgccgcagtgtctcgccattccgcttccctggctcacgcctcgaggtcggggatctcccggccaaggacgccttcctcgccgcctggcgcggtccggcctctgggctcgagttctccgtcgatccgttcgacgggtcttgccgcctcatcttcgcccgcgacaccgcattcaaagtccgggagttccgcgagtctgtggtcatgcgctgcgacgtcaagctcgagttccccgtacgcgacgtcgccgaagtcagggtgttccggctcgactgctcgctgctgatccggctgtcggcggcaccgctggtttattaccgcacggcggacgacgacatccacgagtccgtgccgttcgacctgctcgacgacgatgacccgtggatacggaccacggacatcacccccagtggcgcgattgggcggtgcggcgcgtatagaatcacattctcgccgcgcttctggccaaagatggaacgcgcgctggcgtacatgagggataggagggtgccgatcgttgattgcggtggtggttggggggccaggaggggcctcaccgtgcgagatgagcctgagtttggggagcgaatgcaggacctgttcttctgcgtgcagcactccgagggtctcaagtttccggtgttgttcctcgtgaatgctctggtgcacaagggagtaataaatcaacaccacctcacgcctgaattcttcggcttgctccagaggaaggaggatgatgtgaatgtggctgctttgagggaattttggggggacaaatttccagtttttgatgcatgtggcaggctgaagaatctgcaagatagggttgccaggtaccccaaacttcttcgcaacaagattggggatgacaattcagaggtgaggaggctggtagtcacgcccaccaaagcttattgcctgccaccagaagtggagcgctctaatcgtgtcatccgtcattatcgtgaagtcacagacagatttctcagggttacttttatggatgagggtatgcagctactgaacagtaatgtgctgaatttctctgctgcgcaaattgtcaaagatttgatgtcaaactcgttcctgcataagacaacagtgtacaagcgtattaaaacatttttgacagagggattccacatgtgtggtaggaagtactcatttcttgcattctcatcgaaccagctgagggacaggtcagcttggttcttcgcagaggacagaatgagaacagtggaaaccattaggaaatggatggggcggttcacaagtaagaatgtagcaaagcacgctgctcggatggggcagtgcttctcatctacatatgctacagtggtgatgcagccgcatgaggtcaatgagtgtctcgaggaagttgaacgcaatgggtacattttctctgatggaattggcaagattacgtgtgaccttgcacttgaagttgctcagaagctgcgattgacagataatcccccatccgcttaccagattaggtatgcaggcttcaagggtgttatagctgtctgggaaggagaaaatgatgggatacgactttccctgaggccgagcatgcacaagtttgagtctaaccataatgtgttagaggtggtctcatggacaaagtttcagccaggattcttaaaccgtcagattattacattactgtcctccttgaatgtcccggatgctatcttttctcaaatgcaggaagccatgttgtctaatctcaataatattttgtcggacactgatgttgcttttgacattgtaaccacctcttgtgctgagcaaggaaacactgcagcactgatgttgagtgctggcatttcacctggaactgagccacacctgaaagcaatgctgttagctataaggtcctcacagctactgggtcttttggagaagacaaggatttttgtgccgaaggggaggtggttgatgggctgccttgatgaacttgggatccttgagcaaggacagtgctttatccgggcgtcatctccatcactcaataattgtctggtaaagcatggaccaagattttcctcagcaaacaaaaatgcagagaccattgtgggtactatcgtaatggcaaagaatccatgccttcatccaggggatgtccggatccttgaagctgttgatgtgcctgaactgcatcaccttgttgattgcttggtcttccccaagaaaggtgagaggccacatgccaatgaagcatctgggagtgatcttgatggggatctctactttgtgacatgggatgaaaaccttataccacctggcaaaaagagttggaaccctatggactactccccaactgaagcaaaacaactaccgcgcgcagtatccccacatgtaagctcaactttttggcatttaggcatttgttcccttaaaagttcaatatatggatgcattgcttcaaatattagctcattttgataccctcccattactaatttcttcttgacatgttagtgttcttactgagcaatctctgttgcagctaatatttaagttgagcataaacttccatggaaattgtattgtaggattgactctgaatcagggattctttttcttcctattgattccatgcctgttaatatttcctagagttttgaactatgtgtctatgattatttgtcttctactccctccagtccggtttctaaagtgtccttgtgttttagagaaagtccgtaatattattaggcgtcactcgaatactgagacaggatttaactcatagacagaactgaatagtcacttgcatggagatttttccctttttcttctggcatgattaactgaatctccaataaaaaatcggtagctagcacttgactaataccaggcaattgatgtgctgcaatcgcatgcatgccgcaaaaaacgatccaataaacagagcgattaatatgatgtcacaaacaccccattgctccttggtatttgaggtttcatcttatgcaccttagaaaccagactggagtgagtatttgaataacagatgatagctctgatgacatttctttagtaacaaccctgaaagttaccatctcttcttatgtatcaactttcatggacttactatctcttatactgacaatggatcgttgtacgataattttatgatggtatgtatttattctagtatcttaatatgaatcatgcaaaatcccatataatataattttactataacaattcttggaattaatgtgctctgcacagaatacatgtataatttgcagaaactgtgttcatgtcatttgctcaattaatacatgtttctaaattttcatttgacaatctacatccacaacgcaacggcattattggtcaaagttaaaagagttttagttgcaaaatcacttgtttctgacttcatttctatcccacatccttttctttgacaccaattggtagtagcgggtcactttgttacttcatttctatcccacatccttttctttgagatcttaattagttcaattaaattaactttgggttgacccagagaaaataaaactttgcatctctagtgttttgtgtgtattaggtataggtataggttaaaggcttgatcattctgaaggtagtaagctaatgtgcacagctggatttcaataacatgttggcagaactctaaaggcttgatcattctaattagttttcatttaattcttggagaactgtacctatagagtagtagagtactatcatagattttacttatcaaatgtctggtcttgtagttgtagatcaaaaacacttttgcttcatttggtcatgtagttgccaacggataaggacctgtatggatgctgtggttttgagaaactgtattatcaaaaccacggtttacaaaaaagaggtatatagtggagtttctagaagagtaaagttcatcaccggtccctaaacttttattgtcgtgtcatcccggtccctaaactcgcaaattgaccgtttatgtccttgaacttgttcgtctgtgtcatttcggtccctaaacttgttcagttgtgttatcccggtccctaaacttataaatcgcccgtttaagtcctcaaatttgttcagttgtgtcattctagtccctaaacttgattttgagtctcatctgggtcaaaacaaaacgatttaaaaactttatatcaaaaaataattcataactttttcatatgaactcaaatgaagataaactttatatcaaatttgtagccctcaatgcgatctacgactttgtagttgaaaagttttttatttaatatcgtttagtgtcacataattttaaatttctagatctaaaagctttcaaaaaatattttgggaccccacaaagtttcaatttagaaacttttcaactacaaagttgtagatcgtattgctgactacaattttgataaaaagtttattttcatttgagtccatatgaaaaagttatgaattatttttctatatagagtttttagatttgcctcgttttgatccatatgagacttctaaagtttagagactgggttgacacaactgaacaagtttgaggacctatatgggagatttctaagtttagggactagaatgacacaactgaacaagtttaggtacctaaactattgttttgtgagtttagggacaggaatgacacagccaaacaagtttagggaccggtgatggactttactcggaactccaaaaggagtacttttagtaataccatgtttttcaaaaatacaaatctccttgcatccaaacaccttatagtttgtcaaaaccaaagtatttcacaaaaccatggtatttttctaataaagtaacaaaaatacttcaaactaggactaaggtgttttcataggtcggaattaaagtcaagaactcctgaactacatataagacatcaatacttttcagttcatcatcaactagcactctcttggcttttgagactaacatttgcactttttatccaatcgatctgatcatattgctaatatacaaaaattatgatcatttcacatggtttcttcaaattgctttgtccttggtttgtgataaatattacttttttcagtacatttttattaataagatattgtactgttaataggatattgttgatttcttcttgaagaacatggtaaatgagaaactgggtccaataagcaatgctcatgttgttcacgctgatatgagcgagtatggagcaatggatgagaagtgcattcagttggcagaactagcagcaactgctgtagacttccccaagactggcaaaattgtgtcaatgccaccatcccttcggccaaaattatatcctgacttcatgggaaaggaggatgccatctcctataaatcagagaagatccttggaaggctttatcggtcaatccaagaagcctccagtggtgatttggttccagaagaaacttgcacattaaacgatttgccttatgatgcagatatggaagttcctggtgcaactgattttctctcaagtgcttgggagtgcaagtgctcatatgaaacacaactgaatgcactgctcaaccaatatggtgtgcgcactgaagcagagcttgttacagagcacatatggtcgcttcccaaatacagcagcagaaaacagggggacataaaggagagattgaagaatgcatactctgctctccacaaggacttcaggagcattttcgaaagctttgttacagatcaaactgagatctctgatgatgagaaaattcggttttatgagatgaaggcctctgcatggtaccaggtaacctaccaccccaaatgggtccaaaagtcaagggaaatgctcaaacctgactttgaggacatgccagcaaggcttagctttgcatggatcggggtcgagcacctggcacggattaagataaggtgccatggagaagtgaaagtggacagccgaaggcccgttgagaggctcgcagcctacatatctgggagcatgtgagctggcgtgaagctccatgcaatagtgaagcaagaccactctgcccctttctgccatgccatctgaactctgaagcatggctccgcctagtcacttcgtttttttgttttgttttttttacgaaattacatagttgggacacagacactctatatgcacgtacaccgtatacttatctctatgaaccaacattaatgcatttaccagagtcgaacttgtccaaactctattactaccagaatgtttgtggatataaagtattagttcatggtgtctgaattcc

SEQ ID NO: 810 - DNA, 5998 bp, Sorghum bicolor
  source 1..5998: mol_type = genomic DNA
gtttagatcatccaaaatccaaaaatctttcatcgaatcttgcgacacacgcatgaagcattaagtatagtcgaaaacaaaaattaattgcatagtttatttataatttacgagataaatcttttgagtctacttagtctatagttagataataattatcaaatacaaacgaaagtactacaatattaaaattcaaaaactttttggaactaaacaagacctacgtgagcaaatatgacatccttctagtagtatataagaatggctcagctcgcttttcacacatctaggcttttgatctagtgatataaaggtaattaagatatcaagttaggatcggagctacccacagggattatactctcataaaaagaagatcccactgacatacagttatttgatagtctataggatattcgtgtagtgaatacggctataactctttttttttttttgataatgacacacaaaagaatgtctcatacatgatatatggaggggaacaaagactaaccaattttacttccatagatggactcacaaaactaaatgactatgtttgtaatttaataataaaagtaacaattttttatcatattaaattgaataattatattttgcatactaatcttgtttgagaagacatacacggtatcaatacaacattttaatgcacacgattagtgtaccactttggctcactaaacatatttatatatagatcaccttatcttttcaatagttagtataagattgaaaaacttttcgaactaaatgactcttatacatacatttatctatatttatatttaacataaaattacctaatttggtgaaaagtataagtaccattaatattcttatgatcttcttttttttcttgtatcttaattggtgatagcctgttcgtttggctgaaagtactatttgctaatttattgtgagaaaagtactgctaaatgactgacaaatttgacaaatagactcaaacgaacggactagttagggaatactcatactagaatagggaatctagagttaggtaattattttactgtatttttcccaaaatatacaaggtaccctactttgactcaggctattatagacgaggtactcccattttttttccctcatcacggttcaatccaacccctactttgactcaggaggctatattccaggaaagtctcaccccaaacaataacgccggcctacatttggggaaataatcatgtttgaagagatgaggtctcttcaattttcttacacaattatggttgaagaaacaaagagccttccatttcctacaccaatgttgtaataataaaggaaaaatgagttctttttaagtaaatgacgacggatatactatactgtagaaaatttcaagatataaaatccttcttctccccctcaaaccgacgatataaatccttcttgtcccccgtcataaccaccacttaactatcggggcgcagcagttggcaacccgccgccatggtggtgtcgccggcggagccagtgactacccgtgtcagtgtgggcggctttgactctcgcttcacctcgccgcgcgaactcgccgactacttggaggccgtggccggccgggtctggcgctgccgggtcaagacctcctgcacgccgcccaactcctaccctgacttccagtgcctcccactactccccgcggcgaacgcgcaccagccgccgccgcattattcgtccagggcgcggcgacgccgagctccagacggtgaagacgacggcgcgctcgcgttccaggccgcgccgacgccgtacaatctggtgcccccgcacgccttcgtgcacttcgtgcacccggaggccgcgcgccgcgccgccaggtccgggatcctcgtgcgcgcctcctcctcgtcccagaacaagagcagcgccgccgtccgagaccgcgcggtgcggcgccagaacgccaagccgttccgcttcacgaacgcgcgcgtcgaggtgggcaacctctgggcgccggacgccttcgtcgtctcctggcgctgcccggggaactccggctccagcgccagctccggcctcgacttcgtcgtcgacccgttggacggcagctgtcggctgctgttctcccgtgacaccgcgttcgcgttccctgcctcccgcgaggccgcggtggtgctgcgctgcgacttcaaggttgagtttttcgtcgacgacatcgccgagctcctggtgttcccgaccgatgactcgctgctgctccggctctcggccgcgcccctgctgtactaccgcacggcggcagatggtgtccaccagtcggtgccttttgacttgctggacgacgacgacgacgatccatggatacggaccaccgacatcaccgctagtggagccattggccggtgctggatgtacaggatctccttcaagacgtggttctggccaaagatgaaggacgcactggcgtacatgaaggagaagagggtgccggccgtggtctgcgacattgggtcgccggggttcagggtgcacgacgagccggagtttgggaagccaatgcaggaccttttcttgtgcgtgcagcatgtcgaggagctccagttttcagtcttgttcttggttaatgtgctggtgcataaggggatagtgaacgagcaccagctcacgtccaaattcttctctttgctcaagagagaagaggagcaagtgaatgtggctgcactgacggagctgttaggagagaattctcaggtgtttgatgtatgctggaggctgaaaaatgtgcaggattgggttgccaagaatcccaaactaattcatcctcgcagcaggggcaaggttgctggtgattataatgctgtggtgcggaggctggtgatcactcccaccagggcatattgtatgccgccacaagtagagcgctctaaccgcgtcattcggcactatcatcatgtggcagatcggttcttgagggtaacctttatggatgaaggtatgcagctgctgaacaacaatgcactcagcttccatgccgcaccgattgtccagagcatgatgtcaaaattgttccagcataagacaagaatttacaggcgtgtgcatacacttatgacaaagggtttccacttgtgtggtaggaagtactctttccttgcattctcatcgaaccagatgaaggacaggtcagcttggttcttcgcagaggagggaacaacaactgctgcaaccattagggagtggatgggacagttcccaagtaggaatgtcgcgaagcatgctgctcggatggggctgtgtttcacatcttcatatgcaacggttgtgacacggccgaatgaggttaatgagttgcttgaggatatcgagcgcaatggatacaatttctctgatgggattggcaagatcacaccggaccttgcaatcgaagttgcggcgaggttgccactgatagataggtaccctccatctgcgtaccagattagatatgcaggattcaagggtgttatagctgtctggccaggacaaaatgatgggatacggctttcccttaggccaagcatgaggaaatttgagtctacccactctgtgatagaagtagtatcctggacaaaattccaacccgcattcttgaaccgtcagattataatattgctgatgtccttgggtgtcccagaagctatattttgggaaatgcaggaggcgatgcttaagaatctcgacagaattttgtcagacagagagattgcttacaaggttgtaacaaacagttgccctgagcgtggaaccatcgcaagactgatgctgagtgctggatttagtcctgcaaccgagccacacctgaaggcaatgcttttggctataaagtcctcacagctgaagggtcttttgaagaaaacaaagatttttgtgcccaagggaaggtggctgatgggctgcctggatgaacttggaatccttgagcaggggcaatgctttatccaggcttcatctctatcaatcaacaatcatttcatgaagcatggctcaagattttcctcagcaaacaagaatgcagtgacaattgtaggtacagttgtggttgcaaagaacccatgccttcatccaggggatgtacgtgttcttgaagcagttgatgtgcctgaactgcatcaccttgttgattgcttggtcttcccaaagaaaggtgagaggccacaccccaatgaagcttccgggagtgatcttgacggggacgtctactttgtgacatgggataaaaatcttgtacctccggggaaaaggagctggaaggctatggactactctcctgctgaagcaaaacagctacaacgaagagtacttcagcatgtaagttcaactactctctgcacgtgcacatgattctttcataaaatgtttgttcagttagatgtctgcactgtcaattctatgtttcttttattagttcatgggttttctgtagtactttattttatgtttctgattgctgaaaacatttatcttgcaatgccttaggaatgtattgagaatgtaagttcaattatttcttgtcattgagaatacattgagtacacagcaatggttatgaataacaattgatgttcctcgtttaaaaagaaagtgcattaatttagacaaatacatgtgcatccatgtccatttgacaatataatccttcacagtagtattttcgtagacaaaattaaaatattttggtagcacacaaaaatagtagttctgaaaagtagcagtcagcaaacctgatttgttgagctggtcttcagttcagtctggtttggtcagtcaaaatacaattattatagttttggtttagaaaatccctggtacagttcagctaaatacttttttgtaaaactgaaagttgactgctttggattgttttttattattatttgcactgttagtttagggaactagctgacttaccagatataacaaatttcaagcccattatcaagcatctctttcactttgatttttaaagttcaattattgaatcattatccagttgatcaaacgcatatttattaactaacaatagtaaaactatgactttcacctttatgccatctgatctagttcctaaaaactgcttcttgatttgtgcacaatatttatttatgtagtacatttcattaaaaagatgttgctcttgtcacaggatctcattgatttcttcttgaagaacatggcaagtgagaacattggtcggataagcaatgctcatgttgtccatgctgacattagcgagtacggagcaatggatgagaaatgtattcagctagctgaactagcagccactgcagtggactttcccaagaccggcaaaattgttagaatgccaccatcccttcgcccaacaaaataccctgacttcatggaaaaggatgatgccatctcctataaatcagaaaagatcattggaaagctttaccggacggttagatattatatccttggaatgcccttggaaagtttgatcaaagatggcatgccagcttacgatatcgacctggaagttcctggtgcatcgcatttcttcctagatgcctggcaatggaaatgtgcatacgaatcgcggctgaatgcgctgctcaatcagtacagcgggtgcaccgaagcagagcttgtgacaggggtgatctggtcgcttgccgatggaaggaaaaggaagaagcatgaggcaaacgagaagttcagccatgcatatcctgaactccaccaggagttccgacgtgtctttgaaaatattgcagcagatcaagataggatgtctgatgaaaagaaaaatctagtgtatgagatgaaggcctccgcgtggtaccaggtaacgtatcacccagaatggatcagattctcaagggaaaaggagccgcatggtgaggaaaggccagcaagactcagtttcccctggatcgccatagattacttggcgtgtataaagatgaggtgccgtggacaagcaaagcattttacttga

SEQ ID NO: 811 - DNA, 5946 bp, Sorghum bicolor
  source 1..5946: mol_type = genomic DNA
aggaggaggagataactccccaataccaagaaacttggcatggagagactctaaccctaaggtctcaatctactagaaaaacttattaaaaaaatgatggatcctctggcgagatgctggaggaggaagcgagggggatcagcgatgatggatgcaagggcggcgacgctagggcgagtcgcaaggttgcaaccgtcattggggacgtgtttgaagacgattgcagcctcgcgactccgcctagtgttgccgtcatcaggggacgcacgaaagactatccacgatgacccgccgcagtagttcttcgggaggacggacgcagtactcgccaattgtggaattggtcatgggcgtcagtgcttcagtagtttatctgtattgtgccattgctgagcgtgtagtataggtgttcaggcttgtctaaggagacgatcgtttcgccgttgccgccattggtgtatgcctgctgctaggcgctatctgggtcgtcgttgacgatctagaggtccacgtagaggataacgtcgctgtccgcttggactcctaggccgaaccgctctagggtgcattatgtccacaagttggacacgagcttcctgtacgactgtcctagtcccaccaggagcgtctcttggttgcgcaaagctctgccacagcacggtgccaccgtccgcgaggagctggaggtcgccggagttgaggaacgggaagacgggtgtgcgcttgccgctagagttgacgggcggcgtccacaacatgttgtcgctgccgttggtgctaaactatccatgagtgcgagttgcctgccctccatgttgttgaatgctaagagcgcaccgtgccgtgttgagcggcttcactggtgggagttagtttgtgaatgttgtggcgtagctttttgcagtcttggttttctcaaattggcaacggttttagggacactattctactttacatacaacgttggagcatgtctcttgggtgcgtaaagctccaccatagcacggtgtcgctgtctgcgaggagccggaggatgccagagttgaggagcacgagcacataggcagcatctgcggcacgttgttgcttctcttggcacggcatcgcccacgagcgcgagctgcccggccgccatgatgctgtggcgagcggcgttgctttgcgaatgctgtggcatagcgttgctgcactagtggcacccggtagtggcaagccttccatggtccacatggacggtttagggctactattctactggagtgcacgacaactaatccggatacgatagatgtctccaagcaagaaccaaccactaattcgacctgtttcagggataccaatgaaatagaatcgacaatggttttagggatcctataatttagtcaaagcaataatttttgtgtatcccttcccttgacacatgcacctttctatatatataactcggtcaagcggtaacctcgctgcagaacaggagtagccgagaagacgaaagcggctatggcggctcacaatcgcagtcgaagccccgagtcaactcgccgtcgtgctcatcttcatcgctctctcaagccatccaagcccaaccaacaccatcctcgtgaacgttgtcgacaaaccgcaggccacccgttgccaggatgcaatttcgctatggtgtggccgacagggcttgcgacgcgggcgatcctgaccggcttcgacgccggcctctcggcgcgtggcctcgcagatgacttggagcatgtggcaggcacggtctggcgctgccgggtcaagacttccatcacgccgcctaagtcctacccggacttccatctacctgccatccttgctgccgcggtgctccacccggacgggccgtcgcggcacggtcgcgtggcccctcacgccttcgtccacttcgagcagctcaaggctgcgaaccacgccggtgacttcttcaagatgcgaatctctgcgcagaacacctacctactacatggccgagcggcctgcccgcgagacggtggcaccgacatgaggcgcccgatgctcttcccggactcgtgtgtcgagtttggcgacatcgtgccgcccgacaccttcttcgtcgcctggcgcgggaccgaccactccgcctcggcagttgacttcatcgtcgacccgtccgtcggttgctgccggctgctgttctctcgcgacactgccttcacgttccccgacctctgccgtcgccccacagtggtgctgtgctgtgacatcaagctcgagttctccgtcagcaatgtcgctgaggtcctggtgttcgaggctgatgactcgctgatcctacggctctcggccgcgcccctcgtgtactaccgcacggcaggcgacgacgtccaagatcgcgtgcccttccacctgatcgacactgacgacgacccgtggatacgaaccaccgatgtcaccccaagtggtgcaatcggccggtgctcggcgtatcgggtctccttcggagcaatgttctggccaactatgaggaccgcactgaagtacatggagaggcagggggtgcctgttgacgttcgagatagccgttggctggggttcaccgtgcttgaggagccggacttcgggcggccaatgcagcacgtgttcttctccctgcggcaagatgaagacctgtggtttccggagctgtacttggttaatgtgctgatccacaataggatagtcaatctgcaccagctgacgtctgagttcttcagtttgctgaggagagcacatgaagatgtcaatgttgctgcgttgacagaattgtttggtgcaaagcttcaagtttgtagtaatccatgctcgaggttgaagaacgcgcaggatagggcgaccaagaatctcaatcttctctttcatggcagcagcagaaagcttggtgatttcaatgctgaggtgcgaaggctgatcatcactcccaccaggacatactgtatgccacctcaactggagcgctctaaccgcgttacccggcattatcatcaattgtcagatcgcttcttgagagttgcttttgtggatgagggtatgctgccactgaacgctaatgcattgagcctccaagtggtgcctcttgttaaggacttgatgtccagccctacccaacagatgacaacagtttacaggcgtgtccaaacaatcttgacagagggattcaccatgtgcggcaggaaatactcgttccttgcattttcaacgagccagctgaagcaaaagtcagcttggttctttgctgaggatggaacaacaactgtcgcaagcatgaaggagtggatggggcagttcccgattaggaatcctgcaaagcacgctgctcgaatggggctgtgcttcacatcttcgtatgcaacggtgacaatgcagccttgtgaggtcgatgagtatcttgaggatgtcattcataatggatacaatttctctgatggaattgggatgatcacgcaggacctcgcgttggaagttgccaagaggttacaactaacagatatctacgccccatccacataccagattagatatgcagggttcaagggtgttgtagctgtctcgacgggacaaaatgatgggatgcggatgtctcttaggccaagcatgaggaagtttgagtctgcacactctgtgttagaagtgctgtcctggacaaagtttcagccatctttcttgaaccgccagattataacattgctgaccagcttgggtgtcccggatgctgttttttggcaaatgcaggaagcgatgctaggtaatctcaaaaggattttatcagacaacaatgtggcgtatgaggtcgtgacaaactcatgtcctgagcatggaagtactgcaggactgatgctgagtgctggctttgctcctgcaactgagccacacctgagggcaatgctattggccatctgcgcctcacagatgcagggtcttttggataaaacaaggatttttgtgccaaagggaaggtggttgatgggctgtcttgatgaacttgggatccttgagcaaggacaatgttttatccaggtctcaacaccatcactcaacaactgttacgtgaaccgtggttcgatatttccatcggaatacaaaaataatgcagagattattgttggtacagttgtaatggcgaagaacccatgccttcatccaggggatgttcgtatccttgaagcggtggatgtccctgaactgcatcaccttgttgattgcttggtcttcccccaaaaaggggagagaccacacgccaatgaagcttctggtagcgatcttgatggcgacatctattttgtgacgtgggatgaaaatcttgtacctcctgggagacagagcggcacccctatggactacttcccggctaaaacgaaacaactaccacgtgaagtacatcaatctgtgagtacatctatccctttcttcattttattcagttgagatgtcctatgatgatagacaaacaatatataaccatggtgataatacttttagtgacaaaaatattggtacaacacaaaaaagatttcttttatgaataaatataaattctatattcactttgtataggttagataaaattctaaaagctaagagtcagcaagcataatgtcctgagtaggtctttggattgaaaatgaattgatgcttggagacaaattagtactaatgaatgctaatacacattatgcttggtatgctggtagtctggtactgtggtatagtggtataatttaaacagctgcaataaaggtcaactacattaaatcagcatcccttttacccttttttttacgaatgcaactctactgcaatgaagttcagctacaataaatcagcatccattttgcgttgtttgaccaatgcaactgatgtcagctgctgccaagttccctttttaatcttgtttatttattgaaatgaaacataaatacacctttagcttacatacatatatggtacctaactgatcagccacatatatatatgactaacatagaaaattgtgacttgcatctcctatcaccttatcacatgatttctacatattgcttcttcctttggtttgtacacaaatacttgttgccataatacatctcgttaatgaatattgtgctcttgtaataggatatcattgatttctacttggagagcatggtaaacgacaaccttggtcgaatatgcaatgctcatgttgttcatgctgatcggagcgatgatggagcaatggatccgaagtgcattcagttggccaaacttgcagctattgctgtggactccgcaaagactggggaaattgtgagaatgccaccatccctttcaccaaaagaatatcctgacttcatgggaaagggggatgccatctcctacaaatcaaaaaagatccttggaaggctctatcgatcaattctaagggaaaatggcgatgattttgtgtcacaaggtacatgcatttcaaatgagactccatatgacattgatctagaagttcctggtgccttaagttttcttgaggatgcttggcaatgtaagtgcctgtacgaagcacaactaaataccctgctcagtcaatatggtctgcgtagtgaggctgagcttgtgacaggggagatatggccactagtcggatataacaagtatcaatatcaattaaaagagaggatcaactatgcatattccaaactccaccaagagttccgaagtatctttgaaagcattgatatctcctattgtgacaacaaaaacctagcatatgagatgaaggcatctgcatggtaccaagtaacgtatcaccccgaattcatccgattaagggagcctgatgatgagaaaacacctgcaagacttagttttgcatggattgcagttgattacttggcacaaataaagaagaagtgtcatggagaaatgaaagttgaagagggaaggtcagcctacattttctaa

SEQ ID NO: 812 - DNA, 6357 bp, Sorghum bicolor
  source 1..6357: mol_type = genomic DNA
gcacacaggttgccgggttcatcttcgactgcatcgcccgaaaaggcggcgggcgccactgcccgttgtggcaaacatcggactccactgattggcgccatgcatgatcgacggcgatccagttccagtctgccgctgtacgcccatcctgtggcgaaggcagaatgcagcagggatcagagggactgtcctctccacgaagttcaaacagcatcgggtccgaccaccgtctggcggcggagagctgctgttggcaacgacagcaaactccaagtcttggctgcttgctacctttggctgcccgccccggccccccttcgctagacgacggtggcaaaaggcgctcattgccgttgcctgagccctgaaccctgcccagcatccactccactgtcgcgcaaagcagtcgaaacaggtgctttacgaccggcagaccggagaatttagtggccggcggcggaggggctctgaccgtctcacgttctctctctctctcacgcgctcaccctctctcttgcagatacgatacgactcaaagtaacaaccagagggtccggcaactcctcggccgccaccgcgccttccagcatctgcgctgctaatatgcacgttaaatgatcgtcattgtttgagatgatgatagagcctagtgctagaagatggaatgtgtagtgtcaccactaccattactattcatgatgtaataataattacagtagtagtagtaactcattttgtatcaacactatataatgaggatgcatagtccgccggaacgccgggttcggctccatggcgtcgtcgttgccgtcagtcacccctacagcatcgtgtctgtccatggtgtcgacgtcgtcctgctgcagccgtcgttgggccacagctagcacggtgccgccgtccccgcgcgaggagctggagggtcgccagagtcgaggagctcgagcacacgggcgggcggcgtccacagcacgttgttgctctgctcccgtcggcgcggcgtcgtcgcccaccagcgcaagctgcccgtccccggtcgccgtgatgccgtgacgagcggcgtcgctggcgggagtcaggtttgtgaacgccgtggcgatcgagctgcccggcagcgcgcggcgagccctccacggtccacatggccgtttcagggctactattctactggagtgcaacggaataataggatccgcaactaatccggatacgatagataccactaataattcgatccgtttcagcctttcagggatataccataacaatgaaatagaatcggcaacggtttcagtttcagggaaacgtatctacgcagcaggaaacgtatcccttgatagtacattacatgcacctactgtataatttagtcaaagccataattttgcatgcaggtgtatatatcccttgatgatacatgcatctatatatataactcggtcaagctgccaataaatctcgctgcagaacaggagtagtcaagaggagacgaaagcggcgatggcggcgcacagccgccgcagtcgcagtcgcagccccgagtcggctcgccgtcgtgctcatcttcaccgctctctcaagccatccaagcctacccaacaccaccttcacgaaagccgccgcctgcaaaccgcagaccgcccgccgctgggacgcaacaacttcgccgccgtggcgtggccgacggagccggcgacgcgggtggtcctgaccggcttcgacgccggcctctcggcgcgtggcctcgccgacgacctagagcatttggccggcacggtctggcggtgccgggtcaagacttccgtcacgccgcccgagtcctacccggatttccagcttcccgtccaccctgccgacgacgacgacgcagcggtgttccaccaccaggacgagccgtcgcggcacggtgtcgtggcccctcacgccttcgtccacttcgagcaccccaacgccgctgaccgcgccggccacttcttcaggaagcgcgtccccgcgcagagcagctacctactacatggccgggcggcccgcccgccgcgggacggcggcactgacgacaccagggggcggccgatgctgttcccggactcgcacgtcgaggtcggcgacgtcgtggcgcccggcaccttcctcgtcgcctggcgcgggaccgacgacgactccgcctccgcctcggcactcgacttcgtcgtcgacccgtccgccggttgctgccggctgctgttcgcccgcgacactgcgttcacgttccccgatttccaccgccgcccggccgtgctgctgtgctgcgacgtcaaggtcgagttctccgtcgccgacgtcgccgaggtcctggcgttcgaggcagatgactcgctgctcctgcggctctccgccgcgcccctcgtgtactacagaacggcgggcgatgatgtccatgaccgcgtgccattccaccagatcgacgttgacgacgacccgtggatacggaccaccgacgtcaccccaagcggcgcgatcggccggtgctcggcgtatcgggtctccttcgcggcgaggttctggccaacgatgagggctgcgctggagtacatgaagaagcagggggtgcccgtcgacgtctgtgacagccggtgccggggggtcaccgtgcttgaggagccggacttcgggaggccaatgctggacgtcttcttctccctgcggcacgacgaaggcctgcggtttccggagttgtacttggttaatgtgctgatccacaacgggatagtcaatccacaccagctgacgtccgagttcttcagtttgctgaggagggcacaggaagatgtgaatgtggctgcgttgacagaattgttcggcacaaagcttcatcaagtttgtaatgatccatgctcaaggttgaagaacgcacaggttagggctgccaagaatctcaatcttctctcaaacagtagcagcagaaagtttggtgattacaatgtttttgaggtgcggagactgatcataactccaacaagagcatactgtatgccacctcaagtggagcgctctaaccgcgttacccggcattatcgtcaagtgtcagatcgcttcttgagggttacttttgttgatgagggtatgctgccgctgaactctcatgcattgagcctccatgtggtgccttttgttaaggactcgatgtccagctcgtcccaacagatgacaacagtttacaggcgtgtccaaacaatcttgacagagggattcaccatgtgcggcaggaaatactcgttccttgcattctcaacgagccagctgaagcaaaagtcagcttggttctttgctgaggatggaacaacaactgtcgcaagcatgaaggagtggatggggcagttcccgattaggaatcccgcgaagcacgctgctcgaatggggctgtgcttcacatcttcgtatgcaacggtgacaatgcagccttgtgaggtcaatgagtatcttgaggatgtcattcataatggatacaatttctctgatggaattgggataatcacgcaggacctcgcgttggaagttgccaagaggttaccactaacagatatctacgccccatccgcgtaccagattagatatgcagggttcaagggtgttgtagctgtctcgccaagacataatgatgggatgcggatgatgtctcttaggccaagcatgaggaagtttgagtctgtacaccctgtgatagaagtggtgtcgtggacaaagtttcagccagctttcttgaaccgccagattataacattgctgaccagcttgggtgtcccagatgatgttttttggcaaatgcaggaagcaatgctaggtaatctcaaaaggattttgtcaaacaccgatgtggcgtacaagattgtgacaagttcctgtcctgagcatggaagtaccgcagggctgatgctgactgctggctttgctcctgcaactgagccacacctgagagcaatgctattggctatctgtgcctcacagatgaagggtcttttggacaaaacgtggatttttgtgcccaagggaaggtggttgatgggctgtcttgatgaacttgggatccttgagcaaggacagtgttttatccgggtctcaacaccatcactcaacaaccattacatgaatcgtggttcaatatctccgtcggaatacaaaaataatgcagagattattgttggtacagttgtaatggcgaagaacccatgccttcatccaggggatgtccgtatccttgaagcggtggatgtgcctgaactgcatcaccttgttgattgcttggtcttcccaaagaaaggggagaggccacactccaatgaagcttctgggagtgatcttgatggcgacgtctactttgtgacgtgggatgaaaatcttgtacctcccgggagaaagagttgcacgcctatggactactccccatctaaatcaaaacaactaccacgggaagtacatcaacaagtaagtacaactatccctttgttcagtttattattaagttgacacgtcatatatatataaggaaccatctagttagacccatcttaggatgcagaagtgaagaaatagtgtatctaaaatggtcttttttgccttattctttcctgtcttcacatacttgaatgcacactaataaatgcaatatgcttaccacccccatccagaactatgattaatgggaaatatgatcattgtacatctaaccttaattctagcgtcgaaatctagatggatttatatcctttagggtttaagaacattgtattagatggttcaaaacaaaaactagagggacaatctataatatttattattttagatggtgatagacaaacaatataatcatggtgatattattttcaaatttaaatatttgtgcagaatgtttaaattaaaatttttagtgaaaacaatatttgtacaacaccaaaaggttccttagcaatttttaaaaataaatataagtggtatattcactttgtatagttaggttagagaaaattctaaaagcaagtcagcaagcataatgtcccaagcaggtctttgaattgaaaatgaactgatgctcatacacataatgcttggtatgctggtagtctggtactatgtggtatagtggtataattgtaacagctgcaatgaacttcagctacaacaaatcagcatattttttacttcaatcaatgcaactccgctgcaatgaagttcagctacaataaaccagcatcgattatgcaactcctgtcagctgctgctaagttcctttttttaaatattgcttcataaataaaatataaatacacctctagtgcaactcctgttaccagctggctgctgctatgttcattttttaatcttgtttattaaaatgaaacataaatgcacacctttagcttacatacatagtacctaacggatcagtcacatagaaaaactgtgacttgcacctccagtcacctcatcatctggtttctacatattgcttcttcctttggtttgtatacaaaaaaaaaaaaacttattgccatacatctcgttaatgaatattgtgctcttgtacaggataccattgatttctacttggagagcatggtaaatgacaaccttggtcgaatatgcaatgctcatgtcgctcatgctgatcggagtgatgatggagcaatggatacgaagtgtgttgagttggctgaacttgcagctattgctgtggactccgcaaagactggagaaattgtaaaaatgccaccatccctttcaccaaaagaatatcctgacttcatgggaaaggaagatgccatctcctacaaatcaaaaaagatccttggaaggctctatcgatcaattctaatggaaaatagtggtgatttgctgtcacaagtcacatgcatttcaaatgagaatcaatacgacactgatctagaagttcctggtgccttgagttttcttgaggatgcttggaaatgcaagtgcttgtacgaagcacagctaaataccctgctcaatcaatttggtgtgcacagtgaggctgagcttgtgacaggggagatatggtcacttgttggatataacaagaagtatcaatatcaattaaaagagaggctgaactatgcatattccaaactccaccaagagttccgaagtatctttgaaagcattgatgtctcctatggtgacagcaaaaacctagcatatgagatgaaggcatccgcatggtaccaagtaacgtatcaccctgaatttatccgattaagggagcttgatgatgagaaaacacccgcaagacttagttttgcatggattccagttgattacttggcacaaataaagaaaaaagtgtcatggagaaatgaaagttga

SEQ ID NO: 813 - DNA, 7024 bp, Sorghum bicolor
  source 1..7024: mol_type = genomic DNA
tacagtaacatatagcaacacaaagacacacatccagtcttgatgttagtttgttctagtttctagcaaagtcatttttactgattttttagcatcttacctagtgattcatttgaatttactttatatacacactttccactcaacaaaccgacacaatatcaagaatccactacttaaaattgagcagttattcaaaatgtttcttttccctcttaatctttacaattccacccagactccgcatgcaaaacatgtaggtcatcttacatagttttggccccaacagtgaggtatcatcttataaattatgtgtagtttaagagcatctccaagagcatcatatttttcctccaaaaacatatagttttgcaactctccaagagttgccattaatttactcctaaaatatagaagataattttacatcaagaattttatactatttctaaatcattatagcgacttttatatattctttctctatcatatatttacattaggaatcttttcctattctttattctttctcatacccttccaactgtagattgaccgatcgatacacacatgaaatcagtatccgcgtgaccgcaactatgcataaagttatgtgtgacgagggaggatttaccaagtgctaaattttagcagcatggattcagagttgttagagagagtattttctcatcttactaaaaaccaaggattgagaaggaaaataggatactcttgaagatgatcttaaggccttgtttagttcccaaaagtttttgtttcgggggtactgtagcattttcgtttttatttgacaaatattatccaatcatagactaactagggtcaaaagattcatctcgtgatttacaggcaaactgtgtaattaatttttttttctatatttaatgcttcatgcatgtgccgcaagatttgatgtaatgaggaatcttaaaaagtttttggtttttaggtgaactaaacaagacctaagtaataaactatcatttatcaaaaataatatcaagagccgatagtatcaaacccaatccaaaccatgaacaatccaactttaaaaaaaaaagccgagcctaatcacgctgatatgcgggcctgtccctattttcttggtgctcccgcagttgactcgttgacctcacattcacaaggaaccggcagtcagggtctcacggaggaggcggacggcgggccccactggcagtgccactcattggtcgcgcatgagaatgcagatatcctctcgcgaaggtggccacgtggacctcatcatccgtcacctttcccggccggaggctaccctaccaactgcatctcgggacccactatcctggcccatgcccgtcagtgacttgtgtcgtctgggagatcgaggcggtcgagcgaatcttcggcatgatataatactcgcattctcttggcctccctgtggttcgtttaaaccccacaccacgcccacgccgtagcggagaggagaagagaggaccgagcgagcgatcgatgtcgggctccggcgatcgtcgcggcggcgggcctcctggacccggtgagaacctctctcgcctctccccgcccctcttcgtctcctccctgtggttcgtgggtcgatggatcgcgcaatgcctgatcgtttgagggggtcgtcgagcggggtagggtttatgggggggatttgccgggaattttgtttcgaggatgtgattcgtctcctgcgtgcgggtttggtcgcgtgtatctcggttttgggcggtttgtttccgtgtgtgtgactgcggttttggaggacgagaggagaatgctgcttcgcgtgggtgcggaatcgggtttgtttgggcgttccagttgttcatccgtgctttgtgcggatcctggtgctgcttgtgttgctttttttttatcgttgatttgagttcatctccttggatggactggggggttggcgtattgcgtttgttttggtgggatttagtcttttttttttaacggtggaaaggatttagccatttacttgtacatcctgtgctccgcgaagcagattttgtcaggcctgtgctcttttttttttttgtccttttacgattaagaaatgggtgatctatgagttagtaatcagttagcttatttgttagaaactattgtcatattaaatttaagaaaactattgtcatattaaatttaagaaaatgagtgatctatgagtcaataaacccttgcatttctacaatttcatattatacaacagcaacaaaggatttctgcaatttcatatattatcctaaaataaataagggattaatgttcttatccgtggtagccgtgtttttttaattaaaaaaatgtgaggtgattttattgtgttagtaattgcatgatattttgacggctcttttagttcactgtccttgtgtaatcggtatgtactctttgttttcattctgtgtggttggtttgtgacatttttacaatcattccaatttctgttcgcgagtttggattacgttttgaataggggttcaagttatgttgtgaattttataaaggttttttcgttgttcttagtcaaagtctgatactcattcagttgtctcctcgtaggttacttgcatggttgctggtagtcaattatttttattttttcattgttgctgcttgtctttttaccttgtgttccactttgtttcattctttcattgaggctgataacacactgaataactgaatggtccttgggaaaattatgttactgtgcattggtttgacattgtcgatctggtactctggatatgttcattaacaagtcaaaggcttgatgtatgtgatggcaacatgttatccttactgcatgattgattttgtatgcatttttgttattgttatccatactttgagcctagtgaaattagcaccagtggccaccaattgttatcttaacttgtattggttatataatgacttgcatgtatctcttgacaattagatctttaaatagcttttggtcattacattagctactgatagaactttgatagttgtgaaattactatgttgaatagataaaagtatttttatctctttaagtaatttataacctagttcctgcaactttcctcattgattcattagcatcattatgtttcgtagtggagtatgacgttctttgccattactgacagaaacttgttgagactaatttatctgactctgcataatcttaccctgcatacagatggtggctggaaaaccaaggggaagaactcgaagaaacacgggcaagtaggcgggagccaatggacaccggggagttccacaaatgcgacacctagtacagcaaggccagcatggggtggcaatggctcctcgcacccttctggaaggacttgggctcaagcttcagatcgtggtgctggcaacagatgcaatcctagaccgccaccaccaacactgcgccctgttgtgactccacctctggcaaatggttggcagtggcaatccaggcctcgtccatctggttctgaagtcgagaaggatgatgcttctccatctggttctgaccctgaggtggagaatgttgatggcaacaatgcatcagatgatgatgatgatttgagtgatgatatcagtgatgaatatgattctgatgcaagtgagaaaagttttgagactctaaaaacaaacaagtggttcaaaaaattctttgaaaaattgaatacattgagtgtggaacagataaatgaaccggctagggagtggcattgcccagcatgcaaaaatggacctggggcaattgactggtacagagggctgcaacctttaatgactcatgctagaacaaagggttctaaaagggttaggcttcacagagaattagctgcattgctgggagaggagctctctcgcaggggaacttcagtggtaccagcgggtgaacaatttgggaaatggaaaggactgcaagaaagcactgatcgggagatagtgtggccaccaatggttattgttatgaacaccttattggaaaaagatgacgatgataaggtgactgatcttttttatataatttcatatttatgtccatgtcccttgtcttctggaggttatgatgttttgatattgactaggtaacttggttgtagtattcttttcctgtgatgctaagtacagattttgcattttggttccatctatcccttttaagcataacttgatactacacccctttttagtgcatttgatctgactgtacaaaggtgcaatatgctccgtaagtcgatcagttactatgaatattgtgttatatttatttaccttgatgttaatattcttgtcatgtgtcattctaagttgaccacattgatcctcttcattattttatagctaattgtgttcaatacattgcgcccccacaattttttgagctgagtatggatcataaatgctatccttagatcttatagaagaagtcctttatagctcttcaagggctatacaatgaagttgtattgtattctgatttctgtttattctttgacctgatctagtggaagggcatggggaaccaagagctccttgattattttggagaatatgcagcaactaaagcacgtcatgcatatggtccctctgggcaccgtggtatgagcgtgttaatatttgaaagctcagctgtgggctacatggaagctgaacgtctgcataggcactttgttaatcaaggtacagacaggaatgcatggcagctcaacaaggctcgattcgcacctggtgggaaaaggctgctatttggtttcttagcgagcaaagaggatatggaggcttttaacaagcattgccatggtactgtttcttacaaaactaatgtttctattctgtatatatgcttttttatctggtaaacaacatgatttagtagacttctccctgaattctttatgccttgaataatgatctctgttaagtctgattaaaacatgtacacgtgaaatatattttttgctactgtaatcataaggacaaatgaagttcgatatttctacccttgcacttattgaaatattatatggttattacttttggtaatcgtcttgttcacccactggttatgcatgtttgaatagtattctagtacgtcatgctgcgcttggtcctctccggtctttcctttcctgttacatcctacttataatcgtttttatggtggctgaatgttatgatccttagatcaatggaatgtggcatttggaccgcttcctgataacttatgaacatcgaagcaaaatgcttctttgtgtaccattgttgtcttgtttgtgaaaatacatcacccactcttgactgataaaacattgcccattgtgaatggtgaaaaaattgtgaccgcaggtagtatgacttttcaaacagtacaacagataaatcaaagaaatgggatctgtaacctgtttacagaaatacgaagcctccaagttcaacaagtagtcgagtgtttttaaagtatatacatcaaacttactagttatgttgcatctactgaacaggacatcgagcattttattaacttaattggagacttgctaactatattttcattcatcttcactataatttcaggtaaaagccgtatgaagtatgagatgaagtcttacaatgagatggtcgtgatgcaaatgaaacagatgagtgaagacaaccagcaactgaattacctgaagaacaaggtggttaagacagagcagcactctaaagcagtagaagaatcattgggtgttgttagccagaagctacgtgagactatggaagagaatatatttatcaggagtaaagcaaaagagaagcacttggagtatgagcaagaggtaataaggttacccaagtagtttattttctaccaatgaacatgcgggaatcaacaattttctttttatctaagtctgtgtcaatggctttagtaacaaatgataaagagtttgctgttgctgtgagagtcacacacttctgttttgcacttcaatacttctgtaataagattgatgctgccatcaagatttcaccacctgttgttgaccttgtttccatgctttgcagatgaagtaccaggaggaattttttcatagtcaaattgaggatattcacaaggccacggaggacaaagaaaagctgtttgagaagttgctgcaggaggagcgctcaaaggctagacgatttgatgtagattctggaactaccgaagatcgcaagctaaggtgtctcactaattcatagttggatattaccatgcctaaaaataatgtaaatgctccatctcattgcatgagttgtcaagaactcagggttgcttttgtttcctgcttcaatcatctcatctagacatcataatttcaatgcgcatgtcagttgttgttcctattctcaatccatccatgtcttgtgcaggaaggaacatgtacagaagttcattgattgccaggtcaaggatgtggaaaagtttgaagctgagcgggatgagttgatcaaagtccacgatgagacgaagatgaggctcaagaaagagtacatggagaaggagctggagctggagaaggagctcgacgcagccctgacgggcctgatggagaagcacaagccagatagctttgaggcctccagctcgtaaaggggcttcagcggcttacctcagatcctcatcagcttggaggagcaatcttgtagatgctcctgcttatccataaaagaatgcctagacattctgtagatgttgctaaaccatggtgtccctgtggtggcagcaccgagttatatggtcgccgtagtggtatctcaatcgtattgtgtgcttcgaggatctgaacactgagcgttttgcccgtgatggcatatgggtcaaactacctggagtgtgctttggtttgaatgcgggtgttggttttgcctttcttatgccccggatcattactgattatgttgctccggtcatcaaagtgtctgattcagccatccgaggaaggtcggtttt

SEQ ID NO: 814 - DNA, 7380 bp, Sorghum bicolor
  source 1..7380: mol_type = genomic DNA
tggtaacaatcttaagtaataccattagtcgtatcaccaaaaaccactttatttggaaattgttaattagaataataaaatatgaaaccataaaaggaaaaaagagctggttcatgaatccacttttgctcacaaaaaacgatgagaagaaattatttaagccactttgcaagtcacacaaaggggttgtaaaacaaatttgtaaattatagtagaaaagtcagggagcaatgaccatgacattttttactatcatgtagtttcttcaagtaaatattctccacacagttccaaggaaatagaaaaacatagaacaaaactagtacattgacacaatccgatacaataaataacatacaacaacacaaagacaagcacccgaccttgatgttagcttgttctagtttgtagcacagtcaacttttattgatttgttttagcattttacctagtgatccatttgaattactttatataaatactttgtgactcaacaatttgacataaatatcgagagatcgagtaatatccagaacattcttttccctatatatcttcacaatttcatcgagactccgtatgcataatgtataggtcatattacatagttttggcctcatcagtaaggtatcatcctatcatttatctaaaatatcatgtgctaatagtcttaagattgggatctgagggggggggtgcaattttgtagatgctcactctccatcacttattgatgaacactcatcctataacctattttcccctcaacatcctaggttgaagaagaggggaccaaaacgtagcaaacacatgaagaagtacatgttccactaaggccttgtttagttcaccctgaaaaccaaaaagttttcaagattccccgtcacatcgaatcttgtggcacatgcatgaaacattaaatgtagacgaaaataaaaactaattacacagtttagctgtaaatcacgagacgaatcttttgattctagttagtccatgattaaataatatttatcacaaacaaacgaaaagtgctacagtaccgaaaagttttcacttttcggaactaaacaaggcctaagaaaagaaacaccttcggcatgaaattctcttggcctggtcctcatcaaatgccaccgtacagatcatcaccaaatgaaagtcatatcaaacccaatccaaaccatgaatgatccaaatcgactcactaaaagcctgagccaacgttaaccagctgacatgcgggcccgtccccataattgaatcgcgcatgaatgcatgatatcctctcgcgaaggtggccacgtggacctcatcattcgtcaccttcgccggaatctaccctcccgactgcgcctcgggacccactatcctggcccatcccgtcagtgagtagtgtcgtcggtgagaggcggatcgggcggcgagcggaacgagcactcccgcgcgcacctctcgaggggtggtgccgtccatatgacccgccccggcggccccctgttccgcacttccgctcactgccaaggcatctccattctccactgcaaatcgtaaaaccccacgacgctgtagcggagagaaaagggggagcgcgcgacgcgaacgcgatcgatgtcgggctccggcgatcgtcgcggcggcgggcctccgggttccggtgagcacctcccgcctcttccccccctcctcttcctccctgtggttcgtgggtcgacggatcgcgcaatgccggatcgttcgagggggtcgggtagggtttagggtggatttgcggggaattttgtttcgcggatctgtttttcgtctcgtgcgtgcgggttggtcgcgtctgtcgctcgatttttgggcggtttgttgcggagtgacgggggcttttgggggacgaggggcgaatgctgcttcgcgtgggtgcggactgcggaatcggtgggggttcctttgtttgggcgttttagtggttcatctatggtgctgcttgtgtggctttttttttatgttttgttttgattttcatttccttgtatggattttgtggttggcggattgttcttgattttttttattgcgtttattttcggtgggatttagccatttacttgcggatcgtgtgctccgtgcgaagcagattttgttagccccgtcctttctttttttttgtccttttattataagaaatcggtgatctacgcgtcaataatttgttgcttatttgttagaaaatattgtaatattaaatttaagaaatcggtgatcgatctatgagttaacagatccttgcatttttatttttattttctacaatttcatattaacctaaaataactaagggattaaaagttctcatccttggttgttggttttttttctaattaaaatgttaggtgattttaattgtcttagtaattgcatgatattttgatgcctctttcagttcgctgtccttatataattggtatgtactcttagtttttattctgtgtggttggtttgtgacatttttacaatcattctgatttctattcacgagttcggattacgtcttgaaaggggttcaagttatgttgtgaattttataaaagggtttttagttgttcttagtcaagtctgatactcattcagttgtctcataaggttacttgcatggttgctggtagttaattttttttttcattgctgttgcttgtctttgtagcttgtgttccactttgtttcattctttcatggatcctgataacatactcaataactgaatgattcttgcgaaaattatgttactgcacagtgcacatttgtttgacattgttgagctggtaaacttctgcctatgttcattttaacaagtgaaaggcttgatgtatgcgatttacttgtgtgatggcaacgtgttatccctactgcaggattgattttgtatgcatttttgtgattgttatgcatactttgagcctagtgaaattagcatcagtgtccaccaattgttatcttaacgtgtattggtcctataatgacttgcatgtatctctcgacaattagatctgcattagcttttggtcagtatattagctactgatagaactttgaagttgtgaaattactacgctgaataggtaaaagtattttatttctatattttataacctaattcctgcaactctcggcactgtttagttagcatcattgtgtttcgtagtggagtatgatgttatttgccattactgacagatacttgttgagatcaatttatctgacactgcataatcctaccctgcatacagatggtggctgggaaaccatggggaggaagtcaaagaaacaagggcaagtaggtgggagacagtgggcatcatggaattccacaaatgcgacacctaacacagcaaggccagcatggggtggcaatggttcctcgcacccttctggaacgagttgggctcaagcttcagaccgtggtgctcctaacagatgcaatcctagaccgccaccacaaacagtgcgccctgttgtgactccacctctggcaaatggttggcagtggcaatccaggtctcgcacatctggttctgaagtcgagaaggatgatgctcctccatctggttctgaccctgaggtggagaatgttgatggcaacaatgcatcagatgatgaggatgatttgagtgatgatatcagcgatgactatgattctgatgcaagtgagaaaagttttgagactcgaaaaacgaacaagtggttcaaagggttctttgaagtcttgaatacattgagtgtggaacagattaatgagcaaactaggcaatggcattgcccggcatgcaaaaatggacctggggcaattgactggtacaaagggctgcaacctttaatgactcatgctagaacaaagggttctacaagggttaggctgcacagagaattggctgcattgctggaagaggagctctctcgcaggggaacttcagtgataccagcgggcgaacaatttgggaaatggaaagggctgcgagaaagcactgatcgggagatagtgtggccaccaatggttattgttatgaacaccttcttggaaaaagatgacgatgataaggtgactcatttttttatatataatttcatattagcagtattttttcccctgtgaaatgctaagtacagaatttgcatttgggttccctctatcccttttactcataacttgacacttatgcatcttcttagagcatttgatctgactgtacaaaggtgcaatatgcttcctaagtggatcagttaccatgaataatgtgttatgcttatttacctagatattatattcttgtcttgtgcattttaataatgctgcttagaagaggtgcaatatgatcaatgctgcttagatcttatagaagaagtccttcatagctcttcaagggctatacaattaagttgtattgtattctgatttctgtttattctgacctaatctagtggaagggaatggggaaccaagagctccttgattattttggagaatatgcagcaactaaagcacgtcatgcctatggtccctctgggcaccgtggtatgagcgtgttaatatttgaaagctcagctgtgggctacatggaagctgaacgtctgcataggcactttgttaatcaaggtaaagacaggaatgcatggcagctcaacaaggttcgattcgtacctggtgggaaaaggctgctatttggtttcttagcgagcaaagaggatatggaggcgtttaataggcattgccatggtactgttttcttacaaaattactctttctattttgtgtatgcattttttatctggcaaacaacatgatttagtggccttctccctgaattctctatgccttgaattattactgctttctattctgttgttttcctttctgttttacatcctgtttaatctatgaagtaagcagggtttttttggtggctggaacataacatcagttttatttcatttaagttttaaaatgcatcactagatgctctgtttggatttgttccttttcaagagcagttcatatttctaaatctggatgcagcgcttagattaaagcatcttgtttggagagcaataacagcaaaatctcactaatatttcacaatgcgtccaccaactaacttaatccacagtggagcacaacttaaaatggcacgtatttttaaaaagaacgatactcaagctgtagatttccttctttttataggccaatcaatttctggtttagtgcagctcccttcttcgcgggcctgcttgtgaaggcaagatttctctatgaagttttggaatgtggccttttgaactaaatcatttggccattagaccgcttcctgataacttacgaatcattgaagctaaatgcttctttgtgtgccatttttatcttgtttgtgaaaaatgaaaatgcatcaccactcgactgataaaccattgctcattatgaatgggtgaagaaattgtgaccacagggactatggcttttcaaacagtacaacagataaatcaaagaaccgaaatctgtgtaagataatctgctgctctgcttgattgttttgctgcagcagggattaggcaataggtcatctcttgctgtccatctacattctagtcaactctagcagtatggcaataggccaaccctgtaatggcttacctcagccatgtctaagttggaggctgatctcagccaggtactggtgtaccttgcagttggtatgcatctaccactacatgtatatatattcaatcaaaatcaatagaggagccagttcagttgctggttgctgcacttgtttgtgctgtgtctgtgctcaacctcttcttctacctccagccaagtgcgtgttgtgtgtttgaggtggtgctcacctgtgcaggctggcccgatcccaacaatctgtaacctgtttattcaaatatgaagcctccaagttcatcaagtagtggagtgttttttaatacatacatcaagctgtactggttatgttacatctaccgaacaggacatcgagcattttactaacttaactggagaattgctaactatatttttatcttcactgtattttcaggtaaaagccgcctgaagtatgagatgaagtcttacaatgagatggtggtgatgcaaatgaaacagatgagtgaagacaaccaacaactgaattacctgaagaacaaggtggttaaaacagagcagcgctctaaagcagtagaagaaactttgggtgttattacccagaagctacgtgagactatggaagagaatatatttgtcaggagtaaagcaaaagagaagcacttggaatatgagcaagaggtaatatggttacccaaatggttatattttctaccaatgaacatgcgagaatcaacaattttcttttaatctaagtctgtgtcaatggctttagtaaccaatgatagagtttgctgttgctgtgagggtcacacttatatcttgcacttatacttctgtgataagattgatgctgccatcttttgatttcgccacctgttgttgaccttgtttccatgatttgcagatgaagtaccaggaggaattttttcatagtcaaattgaggatattcacaaggcaacagaggataaagaaaagctgtttgagaagttgctgcaggaggagcgctcaaaggctaggcgctttgatgtagattctggaactacggaagatcgtaagctaaggtgtgtcattaattcatagttggatgttaccatgccttacctgcgactggaactaaaaataatgtaaatgctccatctcaatgcacaatgcatgacttgtcaagaactcaggattgcttttgtttactgcttcaatcatttcatctagacatcataatttcaatgcccctgtcagttgttgttcctattctcaatccatccatgtcttgtgcaggaaggatcatgtacagaagttcattgattgccaggtcaaggatgtggcagagtttgaagctgagcgggatgaactgatcaaagtccacgaggagaagaagatgaagctcaagaaagagtacatggagaaggagctggagctggagaaggagctcgacgcagccctgacggtcctgatggagaagcacaagccagatagctttgaggcctaaaacattgtgtccctgtggtggcagcttgcgtgatacggagacgtgaccagcatcgcgttatattgtcgctgtagtagtatctttcagtcgtagtgtgtgtggttcgagcatctgaagttctgaacacagtgtttgcctgtgatggcatatggatcaaactacaactggagtgttatgtcatcctctatgggcgtgcgactgtcgaagtgcctaattcagctattaggattgacctgc

SEQ ID NO: 815 - DNA, 3800 bp, Sorghum bicolor
  source 1..3800: mol_type = genomic DNA
ccccatgcctacgcccgcgctcaccacctccttgtgcgtgggcatgactgatgctacggcggatccgccggatctgacggcggcggcggtagcggatctgtgccaggtaggcctcctcctctctcctcgtcctcccatatctagcggcggtggatctgtgctaggtaggcctcctcctctctctccttgtccttccagatctggcgacgatggcagtggcggtggatctatgtcaggtaggtctactcctctctccttattgtgccaaatctggcaacgtcggtggtggatatgtgccaggttggcctcctcctctcccgttctcccaaatccggcgacggcggcggcagatctgtgctaggtaggtctcctcctctctcctctctctcctcctcccgaatctgctatctagggttccaagaagctctccttatcatctcttccaactccggcggattatagaatggccaattgggagaggcatgtaggctaggtggtggggatgatcgacgggcggtttaggggagccgacggctgtaggggtagtcgggctaggtcgggacaggggaagcttcaattatggtggcgacaggagggtagagggggagaaggttggtgccgtagtcaagctagggtttcacaggagatccaaggtcacggtcgtggctgtgactgtgatgctctggtgaactgtagcttgctgcgcggagacggtggtggtggcgcggggggggggggggggggggaaaaagggtcccttaaattttggaaaaaaaaggtccttgtttttttgtgtgtgtaaaatgttgtgcaaggtgtatgtgcagaattttttaaatccggattcttagactcctgtgctaactaaatattgagcctcttcgcttaaacttatctgctaaatttggcagcattatttttctcttataacaaatcagtcgaacggtattttcagtcatgacgtttcagacgcaaacaagttcaattaccttaggccttgtttagttcccaaaaaattttgcaaaatttttcagattctccgtcacatcgaatctttagatgcatgcatggagtattaaatatagacaaaaatagaaactaattacacagtttggtcggaattgacgagacgaatcttttaagcttagttagttcatgattggataatatttgtcaaatacaaacgaaagtgctacaatatcgatttttcaaaattttttgaaactaaacaaggccttagttttcggctagcactagttctctttggaaattccgtgggattgcaaatataagcacgaagaagccctcgtaggcaagcactgattctctttggacattctggggaatcgcaagtactcgtatcacgtactcgagttgtgtcattgtagtggagaagccgcacggccgtgcttgcgtcattggctcgttgcgtgtcattgtgtgcagtgcagtgtccacccctccaccccatccgcatccagccagattccagaccagacagggccgcggctttcacgccgctcggacacccgcaacacctgaccggagagagagggaggcggagaagaaaggggaaaggggaccgaccaggcgaagccggccctcggcaatggagacctctcctcctcctcctcctcctccgccgccgccgccgcagatcgatcatcttctctcgcaattccccatcatccccaaacccgatcccgacggcccaacccctgcgcaaacccccgcccccatcgcagaacggtcggcggcgctgatgctggcgctcaccccggagctctgccaggttctccaccgggagcttgctccttcccccgacgacgatccctacttcgctcgctgccttcgccaatcccagctccacctcgaagccctcgccgccagtctccgccccccctcttcctcctcctcctcctcctccgccgccgccgccgccgcatcccttgcacgagtccttcctccgcctcctccccctcagaaggagttgcggacgcagctgcaacgagaaccaggcgcaggcggcggatccaacccctccagctccaagaagcgcgcgcgcgcctccactgaggtggtgcgcgccacccacctcagccccgcggaccatctccgctaccgcgccctcgtccgccgcgcgcgcctcaccttcgaggcgctccgcagcacctaccagcgccaggagacctccagcggcgtccgcaaccgccatgacctccgcgcctccaggcagatgctctccgctggccactggctccaccgcgaggtccgcatcgtcggcgatatccccggcgtcttcgtcggcgacgccttctactaccgcgccgagatctgcgtcgtcggcctccacaccatgcctcaggccggcatcggctacatccccggcagcctcctcaacgagggcgaccccgtcgccactagcatcgtctcctccggagggtaccttgacgacgaggacaccggcgacgtcctcgtctataccggcagcggcggccgccagcgcaaccgcgtcgaccaccacgccaaccagacgcttgagcgcggcaaccttgcgctccacaacagctacctctacggcgtggaggtgcgcgtcatccggggccacgacatcgaccaaggtccgcaccgcaaggtctatgtctacgacggcctctacagggtcattgagtccaccttcggccccggcaagtccggccacgacgtctgcaagttcaagcttgtgcgtctccccggccaggacgacctagccagcaagacctggcacaccgccaagctgctcaaggagtccatggacgccagaatccgcccgccaaggtacatctccctcgacctctccaagggggctgagcttcttcgcgtccctgtctgcaacaaggtggacaatgacaggtctcccctgctatttgagtacattgcccaacctgagtttccagtgcggccagcgcacgtgccagtcaagcagcacggcggctgccattgcgcggggggctgtggctccaagtgcagatgtgagaggaagaacggtggagagccagtgtatactgaggatgacattctggtgatggggagaccggtggtgtatgaatgcggtgctctgtgtgggtgccccatgacctgcgtgaaccgtgtgacgcagcgagggatgaagcaccggctggaggtgttccgctccattgagacaggctggggtgtcagggcgcttgacttgatacagccgggagcgtttgtgtgtgagtacactgggcatgtggttgttatggatgatcagccaggcagtgcattggagggtcgcagcatcatcgatccaaggaggtttccagagcgatggaaggagtggggagacgcctcggctgtggaaccaaacatgaagagactccagtttgcaaagtttgcaggaccaggttatgttcttgatgtgtcacataagaggaatgtggcctgctacattagccacagctgcacacctaatgtgtttcttcagtttgtattgcgtggcaatgaggacgagtcgttccctcacctgatggtttttgccatggagaccatcccacccatgcgtgagctgagcattgactatggaattgatatggagttgagtgcaatctgatgctggttctgaggcatcaatgtggggaaggcaggcttactagactttttggatgatagcgtaggcgacgattttttttttggggggaataataaccatacatgatacactggtttagttttgccctagtttgcacccttcaatagttaaattctagaattcagagtgacagagtatcaaaaggtgctca

SEQ ID NO: 816 - DNA, 10581 bp, Sorghum bicolor
  source 1..10581: mol_type = genomic DNA
gtcatagcatgatgaatatgatgtttcgtgcttttaaaaacgaatcagcccaacaataacgtgcccggtcaaaaggtgcaatttgcatggagctagtatatagtacgtaccaagcgacctgtagccaggcgaggaggacaccgcagcaccggccggtcggcagccagctgctagcttccagcagaaaaccctcctgcctccgggcacagggcgtggtcaggcctgtcgtagcagccgcgcgcctcgggatctcgtacgtgccgcatgcccaacggccgcgtattcgtacgtgcgaaccgatctgagtgcgcgagatcgagaggacgagacgatcgaatcgagagagcgctgctctgtgccattgccacatcgcctgcgcacgtacggcaacgccatgctagctttcttccccaccgccaacgaccaacccgcggaacgctttcacggagacggcaagtgcgtaccctggcccgcgcgagatgccgagtcctcggcggcgaaaggaggcttcgcgcgcgtccgcgctcgccattggcgggacgtgcgcctgcgtgcagcagcccccccgaccagctgctcctctctctgtgacaggcctccctgcagcgcctgcagccagcccggccgggcatgcggccttgtaggcatacgtgtggtctctccccagcagagagacgagactgttcaactgttaaattcattcaaacgggcatttgtagttcaaataatgggttcccaaaaaaaaaacgttcaaatggagcagggatgcaagctggtgcaaatcgaatactatgtttaaccaagaaactaaatttgattatcgaatctgattgttggggtatttgcataacactgtctactagtattattcgatctgcttgtaataaccacgcgtgattttatgtgactaggtgttgagaggaagtgaggaacaaaagttaacttgatatctggaaaacctgaggggctaactgctattcatgcccccaaacatgccaggcaacagtcttcaagggcaaaaaggtctattctcacgccactcctttgagctgtccatgcatgcgtgcaccatgtccatatgcacccatgcaccacccaccacctgcatccaaagcatccagctgatcttaattaattaacaaagaccgtgggccctactaaagaattaagaaagacctaggatccagtggcttctcttgcattaattaatattccttgatcatcaagtcagtcgctaatcaggattaggcgctcgtacggacacacgcagagcccgcggtaaagctaccgttgcggtgagtggagagtggagacggcgtacgtgctccacgccccggttcatggctcctagggtttcctcgccccctccgcctatatagcagccctcttcccccctcacctgctcacccactccgctctcctctgctttccctcgttcctatccactgccaaggggaaccaccaaccccacagagcctctgcttcaatccttcttctcccatggcttaccgcggcggcggccgaggaggaggccgcggcggcgaccgcggggaccagcgcccgccgtacggccacggaggagccgggggatccggaggcggcggcggaggccggcccttcatctggccgccaccgccttccacgccgcgcccggtgatgccggcgccgccgccggggccatacccggtcccggtgccgatgggcggctaccgcgggcccatggtgatgccgcacccgggcgcgtacggggttccgatggccgtgtaccggccgtccgggcaagcggccgtgttcagggcgcccgcgccagcggcgccgcaggtctccttctcgcctgcgcctccggcagctccggtcaccatcagggcgccgccaccatcctcgaagacgacgtcgccggctgctccgtcgtctaccactccggcgcctccacgccagtccgcgcggcagagcgcctccacgccggcgtccgattcggctccggccgcctcctccgcgccgtctcccgcggcggccctggcgaaggaggtggagaagaagctgttcgtctccgagaccgcgctggcgccgcctgcgtcggcggcgcatgggacggctgctgcccgcgcggacgaggcgtcggacctcgacctggcgccggtctccaagaaggggctggcgcaccccgctcgcccgggcctcgccaccgtggggaagaaggtgatgatccgcgcgaaccacttcctcgtcaacgtcgccgacaacaacttgttccactatgatgtgagctatcccctcctcctccccatctcccccctcagctactagtactagtatcttctcgtatccatgcgtgcttggtaagatctggtagtcctgtgcgcgcgcgtgagtctgagatatggattggtacgagcatgacgtgataacatgtgatgatgggctctcgttttggttcttgctttttttgttcttgatctgtcagatccagtgtttctaatgctagcttgttcttgtggttttctcgtttctgtggaacgttggcgtactagcacatgaacatcttgcgcttccagtgtgctacatatgcacgttcatgtggggcttctgttcgtacgtggctctctgcgccaaagcctgtgttttctctttgcttcggtttcttgtccatggtgctggtgcctcggtgatgggactgctattcatctagccatctctctacagtccatgagaggttgttctgcaatcagcacccacgcttttggaaagaaatggcaggctttctctgctgcgattttctgctctgttttttggactgttgtttcttgcatcgaggaagtggactgcagatcagtgccgttccgtaaaaggctcttgccagaacatggaatcggaaaaaccattgggcagatgcgttggaaatcttgcatctgtttggtgcgtcttctttcgtttgctgtcgtttgagcacaagctttctcagctttcagcagtagggcgattttcttttctcagttttttgtttggcactctctctctctctctctctcggtttgcagtgggcctcgtgtcgtgcaacacacatactccaaaacgttccacaatgttgcgcagaaaggccccagccgtgtcttgatctcttttgctttttattctttcctttctgaggccttgtttagtttccaaaatttttcaagattctccgtcatatcgaatcttgcggcacatgcatgaagtattaaatatagacgaaaataaaaactaattacgcagtttacctgtaaatcgcgagacgaatcttttgatcctagttagtctatgattagataatatttaccacaaacaaacgaaaatgctacagtagcgaaatccaaaaatttttccaaactaaacaaggcctgatttgccagatgcagtttttgtgcttcttggttttatctttttgacttgagcttaggccttgtttagttccaaaaaattttgcaaaacaggtactgtagcactttcgtttgtttgtgacaaatattgtccaatcatgaactaactaggttcaaaaaattcatctcatcaattccgaccaaactatgcaattagtttttattttcgtctatatttaatactccatgtatgcaattaaagattcgatgtgacggggaatctgaaaaattttgcaaaattttttgggaactaaacaaggccaaatgtatacatggaacttgctttcagttccatatttgtggttcttgcttgtgtgagagatggccattcattcccatgcatgaagcaagatctgcagaagcaataatgcagatgcatcgtcatatgatgcagcagatgcgcatccatgaaccaaaatccctgcagcttcttctgacacggttgtaccaagtggggttggggatgtgtcctatcgtttgcctgccattggagtagaagcttttgatgaaacagctgctgcgttctcttgcagcattgtagtagatatttggcatcttgttacctttgtccgctttttggttgttgtttctcttccttgcgatctcttgtaccagctgaacttttgattttagaagacggtcagatccattgtggggtttctacagtgagcctctccatgctgttctgcagcatatagttccaaagttggtcaggagacctgtctgtacgagaggggagattctttgtgttgtttcctttttggaactcttcttggaatctccgattgaccatacaaaatttaattaccttgtccttgtacgagagggacggcggtaacttttctttggtacatattatttgctgtgctatttgaacgaagtaaattctcggccgtaggtttctgagtgaacttcgttttataaatgcttgatttttttcgaaatttttagtagtcaatttagtgtattatagatgaaattttattatcactgcagtaaattttattttcactgcagtaaatgtttgaatgaactgtttccagttaaagcttctttaaattagtgacctgtttgctatatctgagttgcttcagtacggagtacctccctttcttccagttgcttttatcgtcttttctgtcctgttactaaacaagtgtagggtgaatgtaaggccttgtttagttccgaaaagtgaaaacttttcggaactgtagcactttcgtttgtttgtgacaaatattatccaattatggactaactagaatcaaaagattcgtctcgtgatttccagataaactgtgtaattagtttttgttttcgtctatatttaatgtttcatgcatttgccacaagattcgatgtgacggagaatcttgaaaactttttggttttcagggtgaactaaacaaggcctaaagagtaaaaccaaacaagcccggcccacggccccacttcgtcccccaaccccacaacacccgcgcatctctctctacccaccgccgcggcagagctcggatcaacgcatcggccggcggccctgcgattgtcgatgtgtcgccgggaagccacgcctctcccctgccgcagcttatagcagtgtagaagaaccctagtcaattcgctcgtttccgctgccagattgggtccacgccgctggatctccatggcagcacaacaaattggcttcccaggttctgccgcacaaagcaaccaaaaccatggccaccacccaaaatgcaaatgctcttcaaaaccacagtagtttaattggctcgtcaatccacctgtaacttgacaatttccttcatactttaatgtaagttgcttctcattttcttaaccctaggataagtgacatgtcatactgtcttgtttactgaatctaggatgagaatttcattattcttccactaaggatactaattttttagtgtttatttgtgtgctgtgatgtgtgaaaccatggtctagttgatctcaacaaaaagattatgattcattttgcctggcatttatgtgtcttttaggtggctattaatcctgagtcaaagtcaagacaaaccaacagggaagttctgaatgagcttatcaagttgcatgggaagacagctctgggtggcaaactgcctgcctatgatggaaggaagagtctttatactgctggttcacttccttttgaatcagaggagtttgtggttacgctggttgatccagaaaagaaggacaaagaaaggtcttcccagatcctattttggtccacttttcagtactacatgaaagttatttctcccctgcatatgttaatgtttttcaatttatagggcggagagggagtacaaaatcacaattcgtatcgctgggagaacagatttgtaccaccttcagcagtttctgcgcggaagacagagggatatgcctcaagaaaccatacaagtacttgatgttgtcctcagggagtcgccatcttggaagtataatggctaaacacaatttcctgcttttaattttgctttagtaatcttttatcctggttactgacaaatttttggttaaatgtcgctgcagttatgtcacagtgtccagatcctttttctctactacttttggccaccgaggcgacattggcgaggggcttgagtgttggaggggttactaccaaagcctgcgcccgacacaaatggggctttcactgaatataggtaatactctgtctatcttgttgttggcccatgccttttatttgataatatgttttggtaattaacattggttttaatgttgccttttgcagacatatcagcaacatccttttttaagcctgtgtcagttatcaaatttgtggaggagtacctgaacatgcgtgatacatctcggcctttgtcggacagagatcgtgtgaaggtaatgttttcacacactgacaatctagaaagcttcttgtacagtacatcctcctattggctcgtttttgttgagtaatcttacatgacattaattgtgttcagataaagaaagcattacgtggagttcgcattgaaacaacccaccaacaggatcaaatcagaagatacaagataacaggggttacttccatccctatgagccagctgatgtaagtatctatatgcaaatgctgcctttcttttctcttctctctacagcatttacgttctggaatattaatgctaatattaatcattgcatggtatgccttgagtttgagtattttgtgcatgtttgtatgtgggtaggcaagttataagacagggtctaggagtaacaaatattttgagagaatattaattctgaattactggcacatcacttactaactgctaaatagttgtagattacaattaatacaatttgaacaatctgatatgtcaacactgtgtcatcaacttaccgctcctttttgtcattttagatttcctgttgatgataaaggaacaagaaagactgttgtgcagtacttctgggacaaatacaactacagcttgaagcatggttcttggccttgtcttcaggctggcagtgattcacgacctgtatatttgcctatggaggtactgtatccatgatcattcagcagtacttgaattattcatgttatgttcattgttttaataaaaaaatgttataggtttgtaaaattctggaagggcagagatactctaagaagcttaatgacagacaagtgaccaacatacttagagcaacatgtaaacgtccccaggagagggagcagagcatacatgatgtactcttctggacccttattcctctgctgtttataatagaataattattatctctgcaggatatcgtttctaatgacaaattttcttatgtgctgcatagatggttctgcataacaagtatgcagatgataggtttgctcaggagtttggcatcaaagttagcagtgatctagtgactgttccagcccgtgtgctgcctccacccctggtaacttggataattttgttttccttgctcaaagattagtgtccaggaatcacctttgttttattctttgaggaataatcagttcctttgctgtatttcagttgaaatatcatgagtctggtagggagaaaacctgtgcgccaagtgttggacaatggaacatgatcaataaggtgagattatgttcttacctagaaatttgtctctgaagttagttgagcattggcatacttgtcaataagttcattgtgaacttgtccagcatctttgtgcactgtttgtcaatcgttgttttgctgggaaatgtttgtcaagcttttaggagtgtctttttgtttaatgctgaaactatcattaccaaattttctagccagtctttctagatgtaacaaagcttttgaccactgttctggtacccttttctagaaaatgatcaacggaggaactattgataactggacttgtttgaacttttcacgcatgcgacctgatgaggtacagaggttctgtatggatctgattcatatgtgcaatgcaactggaatggtaagttctttactatctgattccagacagttcagtatatattgaggttaacttctaatcatccctgtaggttgtcaatccacgtccatttgttgatgtcaagtctgcagctcccaaccatatagagaatgctttgagagatgtacacaggagagccacacaaatgcttgcccaacaaggagtgggaaatcagctgcagcttctgatcgtaattctgcctgatgttagtggttcttatggtatgcataactgtctttcggtctgggtcatacacacctttacaatttattaggatttttgttatataaatgactctcctacttttgcaggtaaaatcaaaagagtctgtgagactgacattggaattgtatctcagtgttgcttgccaaagcatgctagcagaccaaacaaacaatatttagaaaatgttgcactcaaaatcaatgtcaaggtccgaaaacctatattttttgcaataagtttttttgttgttgtctttttttgcaggaatttattaattcctttcatttaagcaggttggtgggcgcaacacagttcttgagcgagcctttgtacgcaatggcataccctttgtgtcagaagtcccaacaatcatctttggtgcagatgtcacacaccccccaccaggagaggactctgcctcatccattgctgctgttagtttctttttataattgtcaagttatcaatcatatttcagttgtatgatttgcttacaatgtttttggaacattgatttgcttacaatgtggtattcctcttcataatttagtgcaatctgagctatgtaaaaataagttatcatgttgctgattataactttcgttgaaattgtgtaggtggtggcatcaatggactggccagaaatcaccaagtacagaggcttggtttctgctcaaccacaccgacaagagataatagaagatttgtttactgtcactaaggatctgcagaaggggcacagtgttaatggtggaatgatcaggtaagtttttgattgatctgagtttgtcctattgttagttatcaaatggtttatctgggtaactgacatggtcttgtttgcagggagctactgattgctttccgcaggaagacaaacagaaggcctgagaggataatattctatcggtatgtgttccagattcctgtttttggttcattttttctacgctattgagtgatgaagtatgttgatttatcacgcctatacagggacggtgtaagtgaaggtcaattcagccatgtacttcttcatgaaatggatgccatcagaaaggtatgattaccagcatcataatttgtctgtcaaatatggttttctttgtcatatgcccatgtcaatggttgtgtccctttccttttcaaggcttgcgcttctttggaggagggatatctacctccagtcacatttgtggttgtccagaaaaggcatcacacaaggcttttccctgaggttcatggaaggcgtgatatgactgataaaagtggaaacattcttcccggttagtgttttggtgtcacactgctattgagttcatatagctgctgcttctgtaagtatttgctgatctggggttattttgtgccttgtgctgcaggaactgtggttgaccaacagatttgccatcctactgagtttgatttctacttgtgtagtcatgctggtattcaggtatgttggtacctcggtgcacattcttttccagaacaccacttgtcagatattgagcgtcaaaattattttttgtcagggaacaagtcggcccacccattaccatgtcctctatgatgagaatcattttactgctgatgcactgcagtcactgaccaacaatctatgctacacgtaagttcaactcctcttcactcttgagtgctctttctctctctgactctttggcttacctaacatctgtctactttaattgatgaaatgcagttatgctcgttgcacccgtgctgtatcagtgggtaagttcttattctagctgctcttctgtttcctatcataatctgctcagctgaagctttcattgatatgagctctttcttgtgagcttgtaacatgagaacatttcaagctctttggcagtggttcaatgatttaacacattggcagaatttcatctaaattgtagatgtattcttaaccagtgcaatgtagtttgattagcgaaaatgaatggtattctctatgtctttgcaatgtgttttttgaatttacattgaaataaacaatcaaggatatcgttgtcatctctaacacctttatctgttgggctcataatcattgtttcttttttattattagtcctactgttgctctgtacagctgtcactgaaccatgcttcatttccttgtgctcttttatgttgtagaatatatgcaaagtagttggttaccagtcaccactaatggtgtgttctttgctttccagttccaccagcctactatgcccaccttgccgcattccgggcacgctactatgtggaaggagaaagctcagacggtggctcaacccctggcagcagcgggcagacagtagcccgggagggtcctgtggaggtgcgtcaacttccgaagatcaaggacaacgtgaaggacgttatgttctactgctga

SEQ ID NO: 817 - DNA, 9561 bp, Sorghum bicolor
  source 1..9561: mol_type = genomic DNA
gagatgaatagcaaggataaggatatagtattatagaagaaaatattaaggagtgagggtcgaaatgaagatttaaaataagcaacaatgtggagatgaatagaatatagaatatactatagaatgaataggatataagcctgggcaaattacccgatacccattacccatacccaaaatacccagacccagacccaaattacctgaacccgaggtacccaatcctaaattcggatagcgattttgattacctaaaattagcttgggtaattcgggtaatatcccccggtacccgaactacccgaattacccaaacatttgtctatgtctttgtatttatcatgtgttgttagttaaacattagaacttatcaatttattagaatataattctctttgtttgaacaagtgatcgtaatatattattctctataaaatgctattgaaattctaatactgctgaaattatatataaatttctactgaaattttgtgtagtgtgttgttttctgaaaattcgggtaaatcgggaatacccgaacccgaattatcgggtacccgaaattgcgggtagtgttttttttagactaatatcgggtaacaattttcattacacgaattttgaattaaccgaattacccgacccgaaaaaatcggataacccgaacgcctaggcttaaataggatatagtatagaagaaaataaggtagagatgaatatgatataggataagagtataggagaaaacatcaaccttagcaataggtgattaatatgttatagtatatatatagaagaaattacataaaggttatggaacaaggagtcaaggatgttgcaatggagatgaatagcatctatatatgcgtggaccacacctattattatcctacttacactttcgtcctcctttcgcataaaagagttaaccgtgagatgataggatggactaagccttatatgttgctttaacccattctaaccaaccaaggtaagactaaaccctctacaacatctcgttaacatgcacatgagttactatatgggccaaactccaaactgggccggtatgacatagcggtggcagcggtaggtagggtgggggggggtgagggtccttgagggattagggtttagatatgaaatatctataattagatttggatccaagggtcacaaattacgtggatttatacatggaaacttagttggtggtctcacgtttcctaggctaattgtacatagaagaagtatactcaatctcattgacaagtgggacccttccgcactctggccccacattcagcgagcttcggcaccgcccggacccgtaggtccgctccccgaaggatcaggtcgggagggctgcgtgcagccgcccggtcgtgtgcctgcccacccccacctttggctataaaacgtgccgcctggtcgtcttggtagtcagttactacttgctccttccacttcgccttccacctcgcaacgaaacgaaaccccatggcttcccgtgggcgcggtttcggcggagggcggcaaggccctggtggtgggcgcggcagcgagggcagggggcgcgggatcggtggcggcggaggttaccaacaaccctacggtcgcggcggtgatggaggcggtgaatccggaggccgaggcggcgtgggccgagggcgcggggtcggcggtcgcggcaacgggggaggccgcggacccggcggacgaggtggcgtcggctaccagcagccgccaccgccgccgctcgggaacgtagaggtcggaggccggggccgcggtggcgtggcggtagctgtaccagtaccagcccgccccgcggcgcctcgtcctcttgcgccggtcgtcgctgccccggcagttccagcagcggcctcgtcttctgcgccgccggcgcaagcgcctcgtgcccccgccggggcggctggaggcggagctgccttggcggcaggcatggggaggttggccgtggccgacaaccccgctcctcccgcgcctgctgcaggtagatccgaggcgcaaggtcctgcgcaccggcctccgcctccgcccctctcgagcaaggggatcactccgcctgcgcgccccgggttcggcacgttggggaggaagctcatcgttcgcgcaaaccacttcgctgtccaggttgccgacaacgacatctgccattatgacgtgagcttcatcccttcttcatcttctccttccttcttctcgtacttttgcactttgcggcgtccgcgattgctcgggatctgttatattcttttgatctgtacatcatctcagtgcttttcatttctctccctaccactaccatcatgtgccggtatgaggatcaccttgctcgtattagctgcggtttcctttctttttcgccttctattttcagggttttagctgcgcggtgattttgcaaaaagttaccatttcctggatctgttcgcgtggatctgctttagcagtgtaccgtgcgattctcgcgtactactagctagctgcttattccgatggatgatggtcgtgcagctttttccttcgcggaagtgttagctgtccgatttcctttcatttttttttctaggtatctaaagtagtagtacttttgcagttgctcctatcgagcaaatgtctacagcttgcgcgtgccgtacttgctgccttgttggtgtaaggagataggggtgaccggtcacacgtctacttgttctctatccaatgatagacagttatttctatgcgagggccaatggccagttcattgctgctttgccaatgatccattcataaagctttgttgttttcaccatttcctgatgaggtaaccaatggccagttcattactgctttgcagacagtttaggcaaggtctttagtactcttggtggttgcacggtggattcgtaatgatttcgccacagcctttttgatgtggattggacttgtggtggtgtgtgactgtttttgagacacatgcgtccagcaaccatggatgaatgtcagcgtgtttatcaaacaaaaagaaggaaacatagggattagtggatgacagcttgtgattctaaaattatttaattaccagacaacttgaacatgttcgaatcctgcatacctgatcagtagcactacacttctagcgcttgttgttgatatatagagatccatttgtttgccatcttgctcgattttgtcctgggttttgtttgctgaattctgtgtgatttatgtttcttatgtatacaagaaatatttgatatttctctcttaatgtctgattggaaggtgttttttttgtgtgtattccatacatatttgactcgacacatgcacattatcaggttttaatcaatcctgaaccaaaggcaagaagaaccaacagggtgattctgtcagagcttctcaaggtgcatggtgcgacatccctcgcccataagatacctgcctatgatggaagcaagagcctatacaccgcaggcgagctgccattcaaatcaatggagtttgttgtcaagttggggcgccgagaaatgtaagtaccactcctgtgtcatatgtgcagtacactctcttgtgacttgcagctgcttactgataaaatttgcatcctgttattttaattgctgaaattcagtgagtacaaggtgacaatccgatatgcggcacagccaaacctgtaccatcttcagcaattcctcaagggtcagcagagggacgccccatatgacacaattcaagcattggatgttgccctgagagagtctccttctctcaagtaggatatcagtgtcatttcttcactttcttttttttgcagtatcctttttgttgagctgctaaccacgtgcttactaatttccttttgttttgcagttatgtcactctttctcgatccttcttctccaagaagtttgataatggggtggacattggtggtgggctagagagctggagcggatattaccagagcttgcgcccaactcaaatgggcctctcattgaacattggtaagttatcttatccaaaaaaatcaatgtgtacaaaactgcaccaaataattacttgattttgattgagtctcaatattgaggggatggattgaacaaatctccacagtttcagtatgggaattttgtgtgtatgctattttgctggtgtgccattgttggttcgatatttatgtgtatgccactggaacttgcatctcaagttcagttggaacataaatatgaactgtgctgtttgctgtttggcttgatcgaaatagccacttgtttggcatacatttctgatttgttccaaaactcataagcctcatttggtacaactctggacggctcccgctccttcatgaacagccgttgaaaccactaagcttcactggttttggctcctcggtgcattgtaggaaggagttttgtggccctggagcgaaacacaaaatgaggcccctatatctagacaataaaggccttgtttagttcatccccaaaacccaaaacttttcaaaatttcccgtcacattgaatcttgcggcacatgcatggagcattaaatatagatgaaaataaaaactaattacatagtttgtctgtaaatcgcgagacgaatcttttaagactagttgctccatgattggacaatgtttgtcaaataaaaacgaaagtgctacagtgtcgttttccaaaattttttgaaactaaacaaggccaaaataccaaaattaggttccattatatgataggttacagttttcagtaataagaataagaattataatatgtatttaataaccttctccaccattcattaaaccactgggtaagagtgcacgaagttagatgaaaataagaattgagaaggcatgtcgctcgataagaaaagtaaaattaacaagcaggaaggacttaatggctgactggtggtaggctggtagctagaaggaacttgtcatggcaacctgccttgtcttgttaaatttcatggtgtggtatgcagtgcccgctgaaagacagtcaatgctaatatcaggtgcattgaattgtcgcatggaaggcaatatagtcatggtaggcgactcaagacttgagacataccaaaagagtcatataggttatcggtaaacgcttgcacaatgattcttgtgagctgcgtcaagaatttaaaaaagaaactgccaattaggctaactatgcttaaactaattaggcataatgacaaattactaattagggcctccggatttttgggggcccgctgtggtcgcgccactagcgctgcccaatatacctgcccaatacacggcctctttttttatgcgatgaatgtccatgtgtatatttttctgtttttaacctcttgaactcacttatgttgttcagatatatgctcgacttcattttaccaatctatccctgtggtaaaatttgttgatgattgtcttgggctgacaaaccctgcccaacctttttcggacagggatcgtttgaaggtagcatttgtcaacaaaagttgtcacatgcaatttaactacagtaaccgactgatctgtctctatctacaaattttcagcttaagaaagccctgcgtggagttcgtgttgagactacacaccagcaggggaaaaaaagcgcctacaagataactgggattactcctgttccattggctcagctgaggtacccatctgttcatatctcttccctccttgcctgtttgttctagtaccaagacgaacttatccatttccatttcttatcttcagcttttcttgtaacgaaggacctcagttgactgttgtccagtactttgctgaacggtacaactaccggttgcgctatactgcttggccctgccttcagtccggcaatgattctaagccgatatatttacctatggaggtaatatttgcatctttgtgattcctatacagcacctggtgcaccatgcaatagttacatgcataatatgtattttcaggtgtgccaaatcattgaaggacagaggtaccctaggaagctcagcgacacacaggtgaccaatatactgaaggcaacctgtaaacgtcctcaggagagggaggggagcattattcaggtataggccaatataactttggctttgacactgtcttttcgattggcaagtttcttagacatttaaatgtgtaacttcttgtactgatatttttcttttgaaatttaatagttttctctttcatctgatcttttgtttggttatcctgtaaatagatggttcaccgcaacaactattcagctgataagatggcacaggtgtttgggatcactgtggccaaccagatggctaatgtgcaagctcgtgttctgcctgcacctatggtatctattgtgcagcattctcaatttgatgatttatattttttttgattaattccaagactgacctatatatgtaaacttgtttcagctgaaatatcatgaatctggaagggagaaaacggttgcaccaagtttggggcaatggaatatgattaacaaggtgattctatatgctggctagttaaatttcctgatctgattttttttctattaagatcattttcattttagttgatataataggtacatttggtggttcgtagagttggttattgttggatttggagtagtcttcttcgaagagttggttattgttagatttggaatagtcttcctactgaggttcactttttgtttccagaaaatggtcaatggtggaactgttcacagctggacttgtttgagcttttcgcggattcagcttcatatagtagacagaatatgcgaggacttggctcagatgtgcaattccattggcatggtaaattcgtgcatatgcttctggatactattatagttaacaaagtcagcagccaggtaatgttgaatttgatgtcaatgatatttcaggattttaatccaaggcccgtgacagaagttcagtcagcctcacccaaccacatagaagctgctttaagggatgtgcacatgagggctccaaatttgcagctgcttattgtcgttcttccagatgtttctggtcattatggtacgtgcatctttgaaaaaactgtgcaacttataaattttgtgaaaataaaattacgtgcatattgatatgggagactttctttacacaattctatgggaaaagttaaccagtagcaagttatattgcttttgtgtagcacacatgaagaattattatgcacagcacacacaaggcatgttattcgcattgtatgtgtagcaaacgtgcagtgtactttttccagcagcacttatgcttggttttatggtaaagtcattggtatgcaaatttgtagggaaaattaagaggatatgcgagactgaccttggtatagtatctcagtgcatcaatccaaagaagaataaaaacaagcagtattttgaaaatgtcgcccttaaaatcaatgtgaaggtcagtgcagtttactgctttcttctctcttgtgtggttcagctgttatggaaattgaaatttattctgccttttatcaggtgggagggcgcaatacagtgcttgagagagcctttgtgcctaatggaataccttttgtctcagatgtgccaacaatcatttttggtgctgatgttacccatcctacagcaggagaagattcctcggcttctattgcagctgtctgtttcttgttctctgcatttgtttcgttcaaatgctatagtaacttgaacgaattttacacttcgcatttgaacatttactcccaatggaaatgttgtgacacaaagtaatggaatgatataaccttttgcaggtggttgcatccatggactggccacaagtcacaacatataaagcactagtctcggcgcaagcacatagggaagagattatacaaaatctgttctggactggtacagatccagagaagggcactccagtgaacggtggaatgataaggtaactttgtatcctttgtgttcatgagaactgttgaatgaaagaggtgacagtttgaaactaaggtgcggctgaattatgctctgcagggagttgctgacttcattctttaagaggactggacgaaagcccaaaaggattatattttacaggtatgtgcttgatttattacataactctttgatgaagccttcataacttccagtacttttgttttgtttatttagggatggtgtaagtgagggacaattcagccacgttttgctccatgaaatggacgcaatcaggaaggcctgtgcctctatggaagatggttatctaccaccagtgacattcgtggtggtacagaaaaggcaccacacaaggctcttccctgaagttcatggaaggagagatcttactgacaaaagcggaaacattcttcctggttagtaccatgatgttcatccttgttcataacttaagtaaaatagtaaacagggagaagaaacgtccaccttaagcattgagcattattagtgagaattggaccctggttgggttaaagacaaccgccagactagccatactatatcttagggatatctccgcttctaacataagtatgatattattttgagcacatacatgctgattgtgatttgtgtcttcttactgttaaaatacacaggaactgtggttgatactagcatttgtcatcccagcgagtttgatttctacctctgtagccatgctggaattaaggtatgattgagacacctgtcactcaggcatcaggttttttgattgtgtaatatttgtcactctgaatgtaaattcatttcttcagggaacaagcaggccaacacactatcatgtcctctatgatgagaaccgtttctcggctgatgctctgcagtttctcacaaacaacctttgctacacgtaagcttgacccgactcccattaaccactgctccaacttttgtgttactatatttgttccccaaccccaatatatttggtgccatctgaactcgagcacttttgttttgcaaatgcagatacgcacgctgcacacgcgctgtttctgttggtaagtcgaataatctgaccaatctgttcatgtgattagcccagtattgcaaattcattacttggggagattagttttctttccctgtttctctctgtatttgtgtccagattgatgatccttgagttcctccttcatgcagttccaccagcctactacgctcacctggcagcattccgcgcaaggtactatgacgaacaagagagcaccgatggaacctcagttgtcagtggtagcgccgccacagccggcggtggcccacctgcgttccgcaggctcccccagataaaggagaatgtgaaggaagtgatgttcttctgctgatgaaccggcgcgagctgctgtttgcttctattagtgtcgcatgcctttgctcctcagtatgcaagaggtgttgttagtttacaaacttagctgctgatgcaactttgagtatttgtggtgagttggtactgatggctgttctgactatattttgcatgagtgctgttaatgaattttagttgtggttt

SEQ ID NO: 818 - DNA, 7744 bp, Sorghum bicolor
  source 1..7744: mol_type = genomic DNA
ctggcatggagctaaggagcttcatgttaaggctttttctataatccatggaccatgctgggagattaaataaacaaacccaaaatagtatagacagacggtaaagtccatgtgaagaagtttcacctttggtacagcactgcattttgtggctttctattggggttttccccccgaatggaccacattgtggtagctgttttgccctccccaacaaaatgtgcatttgcactgtgtccactgtggtctcaaaagaaattgtaacagtgtcctgcagatcagcagatggggggccagctcacagtttagatacactgaaaaatccaaaaatttataaaattcttcaacacatcgaatttttcgatatatgcataaaatatttaatataaataaaaaaaataactaattatataatttatcaataaattgcaagacgagttttttaaacttaatagcccatgattacacaatatttgttaaatacaaacgaaaatactattatatcaaatttcaattttttttacatctaaacaaggctaccactgctgcgctagcatttcgagtgtgatgagacccatcttgagcgtagcatctagtctagtggtcgtagcagtaccagcagtagtcgcggattattctgcacttgttgtcattatccacgccttaaaaacattcctaacaccacggagcgagcggagctgcgtgcgatggagtgccgcacgctacgctatccgccaaccacacgaaggaaggaacatgcgccgtgcttttttcaataaaaatccccatccatccctcccctccatccccctggaaaacaccaacatccgaagcccagccgcgcccactgtctcgtgcgcgtgccccccagctcgttttccacggcttttttacgcgccgcgccatcacattcacctcaccgtggctgccgtgccagtgccacgccggcggcgtcgtagcgtgcgcgcactcgcgctagtgggagctcccagcacaatccccggttctccgacgcctgccccctttggtaaaaacaggaggattcaatcgcggccgctggcccgctgccgctacccttcgccggccccgttcccagtcaaacctgctctcgactccgggcagctgctgctgcatcagcagtgccgtgccgctggagagagagtgagagaggttctaatgcccttctgtcccgcgccgcattaatttcgcgtttttgagaggtccggtccggcggagtccggagaggacgcaacgcaaggccttttattttttaccgcgcgttttcacagtggcggcctctttctttcttggctcgtagctctcgttccgctcatcagcttctgcctgccttcgcctttgccgctttgctgctactccactgatcacgttataaggcttccgcgcaggcgagctgctgctgccgccttgtcgggtaacgaacgacctcacctcgtcggccgccctctccagtccagtggtcacatgctcgaggtcctggacatggcgccgccgccgccgccgccaccgccgcaggcgcaggcgcggcaccaccaccaccaccaccaggggccagccaacaagggcggcggccacgcggagcggacgaagcagccgctgcagagcagcgtgacgcagcccaaggcggagccaccggcggtggtggcggcggccgtgctgccggagggaggcaagcggtgcggaggaggaggaggagggaggcgccgcggcgggcgcggccgggccaaggcgccgccgggtgagtctcgtgctgcgctggcggtagcggtagcgccagcgccggcgcaggcgcctccgccgcgcacggtcattgggccgcccgtgccgagcaaggggctgtcgttctgccgccggccggggttcgggacggtgggtgcgcgctgcgtcgtcaaggctaaccacttcctcgccgagctcccggacaaggacctcacccagtatgatgtaagtgctctcgccgtcgccgctcgtttcgttaagcgctagcgcaattgagatcggaaggcgacgcctttgtgtttctccgtgtggttttgcaggtgaagatcacgccggaggtgagctcgcggaccgtgaaccgggccataatggcggagctggtccgcctctaccgcgcgtccgacctcggaatgcgactcccggcctacgacggccgcaagaatctctacaccgcgggcaccctcccgttcgactctcgcgagttcgtcgtgcgcctcaccgatgaggacgacggcaccggcgtgccgcctcggtacgtgcctgcgtttgttccttgcgccacttgggcagccgcgtccctcctcgtacgtctttcttaataatggcatgtcgtactgattcgcgagattgtgcgtccctccagggagagggagtacagggtcgccatcaagttcgccgcgcgcgccgacctccaccacctcaggcagttcatcgccgggcggcaggcggacgcgccccaggaggccctacaggtactcgacatcgtgctccgcgagctcgccaaccagaggtatttattccatcggcgcctgcattgattgcaacgccgcgcattgcccatttgcgttcttggatttgaggaagctaatgctagcgcttgcttcttccccgtttggttaggtacgtgtccatagggcggtccttctactcgccggacatcaggaggccgcagcggctaggcgacggcctgcagtcgtggtgtgggttctaccagagcatccggccgacacagatgggattgtcgcttaacatcggtgagttgtgctggctggggaatatttgttgccctcatgcatgtgatttcttttttgtcctgtggctgctgcttacacgacgatgttgacggcagacatgtcgtccacggcgttcattgaacccctgccggtgatcgagttcgtggcccagatattaggaaaggatgtcatatcaaggccattatccgatgctaaccgaatcaaggtaatattgctgtggttgggcaaggaatctactagcatagtactacactacagtgatatgtaacagctgcattgggtgctaacattacttatggactgttagctggttatgtcctatggtttttgtgcgctctaatccccaatttatctatgtaactcgcttattatgccaagcagatcaagaaggcattgcgaggagtaaaagttgaggtcactcaccgggggaatgtaaggcgcaagtatcgcatttctgggttgacaacgcaaccaactcatgaactgatgtatgtacagattctgaatgaactttgctagctcctgaactgaagtactgttattgtcatctctttcaatacatgatgatgtagcctgatttgataaacataaaagaatggtaacatgttgacacaaaaatcggttatacccaatttctgcttaaattaattatattgatttatctaattcgccttagcagtgaattgatttgtcaaaaaaaagttacgtgatgatgaagggttgttaaacattgatgcctaaatcatgcgatcatttttttctaattttgacagtttcccaattgatgagcaaatgaatatgaaatctgtcgtggagtacttcaaggaaatgtatggtttcaccattcagcatcctcatcttccctgccttcaggttgggaaccaaaagaaggcgaactatctaccgatggaggtcagtaatatgctaatcacaaacttatgtttgcctgtcaattgtgtttatgtttctagttagtgttctcaataatgaacgttgtaataatgagattttttaccaggcatgcaagatcgttgaaggccagagatacacgaagaggctgaatgaaaaacagatcacatcattgctgaaggttacatgccaaaggcctagagaacaggagatggatattctacaggttgagagtttttgtcatctcccctattattaaagaagtaacttttgaacacaaacacctgctgtatgttgagctagatgtactagggttttattgtaagtaaactgaatcatgtctcttgcactgaacatatgtattatatgtggagctaaatgttctagcattctagggtttttttttgttcccagtgaacaatctgaacattgcaagacatgcattataactgttcattgtcctatcctagagtcctgcatatatttgccagtggtccaagctttccatgcagtgggccttgaatagatagccattaacactgctagggtttttgttttaacaaaaaattttaacataaattttgattaaaatgtctcaagagacttcgtttattatttgttttcagacagttcatcaaaatggatatgagcaagatccatatgcaaaggaatttgggatcaacattagtgagaagctaacctctgttgaagctcgagtccttcctgcaccttgggtaagaataatcttatgtcactgttattcaattttctttcccttcggaagcaccttacactattattcatgaagttagttgctcactgttgatgcgttgaattacttttgtgaattcagttgaagtaccatgacactggaaaagagaaagagtgcttaccacaggttggtcaatggaacatggtaaacaaggtaagattccagcttgtgtgaatctattgtttgctgattactatgtttgattgcactaaaagtaggcctaattgcctaaaataaactcattttacagaaagtgataaatggatgcaaggtgagccattgggcgtgtataaacttctcaaggagtgttccagaaaacacagctaggggattttgccaggaattggcgcaaatgtgtcagatttcgggcatggtactatacccctcatctctgcatgtgtttatgcacaagacaaatacttgtttagattgaaactgtaagcatcttttaatttgacctcctaagtattacaggaatttaacagtgagccagtgatgccattatattcagctagaccagaccaagtagtgaaggcacttaaaaatgtgtataatattgcattgaacaaactcaagggtaaagaacttgaacttcttttggctatcctccctgacaacaatggtccgttatatggtaagtgtcataattgccttgcatatatatttactttttgaactcttacatattttctcagatataactttatatatattcaaagcgatataactttgtatttgtaggtgacatcaaacgtatttgtgaaactgatttgggattgataacacaatgttgcttgaccaaacatgtttttaagatcagcaagcagtacttggcaaatgtctcactgaaaattaatgttaaggtacttaccaccttgtttatacatgaaatacattgcagaacagcaactttaaaagataagtggctctattattgactaacggtaccattaaattcagatgggaggaagaaatactgtgctcctggatgcaataagttggaggattcctttggtcagtgacataccaactattatatttggtgcggatgtaacacatcctgaaactggggaggactcaagtccatcaattgctgccgtaaggctcattattactttgccattttctgtgtcaaaatgtcatattcatcaggatacacacatccttaccttggtttcggacttatctctctctttattttaatatgctgctcacaggttgttgcttctcaagattggccagaagttacaaagtatgctggattggtttgtgctcaggcacaccggcaagagctcattcaggacctttacaaaacatggcatgatcctcagagaggcactgtaacaggcggcatgatcaggtttttatctacgagaaatgtgaaatcctcaagcgcaatatataatttaatctattaaaaatattggctgatttgaacttattttctgtgatgttttgttgtgcagggagctcttaatatccttcaggaaggccactgggcagaagccattgagaataatattctacaggtatgtttgcaaatattgaccatcacctgtagcttgtagatggcaataataaaacatgtctgatgcctattattaccatgtgaatcttttctaaatacattagggtgtaggttggtgatgtatcgcagggtggacatatccattgctaggtcttctttatattgtaactaaattaccctttcctcgcaaaactaaattatgcacatgttaaatttattcaatttctctttcagggacggtgttagtgaaggccagttctaccaagttctcctttacgagttagatgccatccgtaaggttggttgcattttgttttattctattacactcttctaagctccttcttaaagtttactaactagtgctttccttcaggcatgtgcgtccctagaaccaaattaccagcctcctgtaacatttgtggtagttcaaaaacgtcatcatacaagactttttgcaaataatcacaaagacagaagtagcatggacaagagtggaaatattttgccaggtagtgtatctatggcctctaaatctttaggatgtgtatctataaccacactttcaactgacatattcctaagtttaatagtacttgaactaaaatgtattgtgttttggagtaaaaagtatcttgtctaaatttaagattttaagaaattagccactcttttgaggcagtcagatttttcttttgtttaaattgcatgatgttgaagttattcccttgtttctatgactgctcacaagttgattggaaacaggaaccgttgttgattctaagatatgccacccaacggagtttgatttctacctctgcagtcatgctggaattcaggtaagggcctgtttcggtcccatgaattgaaacaaatatctagatagtgcttcccatttcattattattaggttactttccaactgttaaattcctgggaaccaaacagggctagtattcctttgtgggatcctgggaaccaaacagcatatgttcctgtactgattttgtcatttgtgaaatactactagtattgaaaagtcttgtcatatgctctattccacaagctatttgcacctatctagtggcctccatatgctaaaagaatagtataacaaactgatcctatggtcaaccttttatcatgtgattgtacagctatggtacttggatcagtagcatgggaatatagtcagattctccgtactgtactgtactgaaatgactgatttgtgagtttgccagggaacaagtaggcctgctcactaccatgtcctctgggatgagaacaatttcacagcagacgaaatgcagacattgacaaacaacctttgctacacgtaatgcacttttatatgctatatttgtcccttgcattttgaactttaacctttcagaattttcttagcttgatgtacatgttattgatgcagttatgcccggtgcacacgctcggtttctgttggtatgttcttctgtgctttacagacaaactttttcctagttccacaattttaattatcgactctttatcctgctcacctgttcagaaaagaactttgacctgtgatgttgtatcttttgcttcttaacagtccctcctgcatactacgcacacctggcagcattccgggctcggttctacatggaaccagagatgtcagagaaccagacgtcaaagagctccaatagcacgaacggagtctcggtgaagcccctgcctgctgtgaaggagaaggtgaaaagggtgatgttctactgctga

SEQ ID NO: 819 - DNA, 17643 bp, Sorghum bicolor
  source 1..17643: mol_type = genomic DNA
tttaagacagacagaccagtactcctacttccgaaggagcacgagcgtggttgttgcccccaccacttcatgccttcgtcgtggtctcgtggaacattggaaattttgaaaggcagaaaaccaagcgcacaaaagggatcgaatctccaggcccacccaccgaccgttcccctcctgtcaagcgaccgaggtactgtgcccgacagctacaggatggggttatggggatcagaggatggcgcaacgcggcaatggaccctcgccgagtcggaaagcgtactcatcactaccgaacaagcgcaaaaagttccgtgtcccaacatctttcccctcccgaggccctgttcggtttttcaagaatcttggccacattaaggtcttgtttagatgcatccaaaaaaactcaaaactttataaaatttctcatcacattgaatcttacggcacatgtatgaaacattaaatataaataaaaaagataactaattgcacagtttacttgtaaatcacgaaacgaatcttttaagactagttactccatgattggacaatatttgtcaaataaaaacgtaagtgctacagtgttaaaatccaaaaagtttttggatctaaacaaggcctaaaccttgttgtatatgcataaaacattaaatataaattaaaaaataattaattataaagtttatttataatctataagacgaattttttaaatgtagttagtctataattggataacaatcgttaaatacaaacgaaaatgctataatatattttattaattttttcaccaaggccttgtttagttcacaaaaattttcagaattttccgtcatatcgaatctttgaacgcatgcatgaaccattaaacgtagacgaaaacaaaaactaactatacagtttacctatagacaataattgtcacatacaaacgaaagtgctacagtagacaaagccaaaatttttcacgaactgaacaaggcccaagtaaaaacatatttggttgcatatgttaaactttatcgtctgtcacatagaatatttagacacacacataaattattatatatattaattataaaattaaaaacatagttagagaataatttacaaaacgaatttttaaatataattaatttataattagacactaattattaattaaaacaaacatattatagtatcaattaaactttaacggccaaaactaaacatccctggacagtccccgagtctcaaaactctcaacacctccgtttcactgccaaactctcccgttctctcccaacagttcgttcccaccccgcacgcacgcgcgcgcgttgatttgaggcggcgcttgcactgcacggcgtcgtggaggcagcggcagcggcagcggcagcgcaaccgtccaccaccaagccctccgcattctctcgtgcacgcgtcgctaaacctccctcgccccttcccctgctccttctatatacctcgccgccgccgccgccgaagccgaagccgccggggaggtggtaatggcggaagaagatccgctgccgccctgcgacccgcagacgcaggcgagatggtgagtgcagcgccaccgcgcgcgcgcgcgcgcgccctgccgccgctcggcgatcggctcctcgtccgccgctcgctcgctcgctcgctcctccgtcccgctcccgtcctaatgtgggtgcccgccccccgcacgcaggtaccagctcgaggcgctggagcgcgcgctggccgggaacacgctggtgttcctcgagacgggcgccgggaagacgctcatcgcggtgctcctcctccgccgcttcgcgaaccgcatccgctcgtccccgccgccctgcttcgccgtcttcctcgtccccaccgtcgtgctcgtgtcccagcaggcgcgcgtcgtccgggcgcacacggacctcaccgtcgccgagttcttcggcgagatgggcgtcgacttctggaacgcggacaagtggcgcgacatggtcgacggggccgaggtgctcgtcatgacgccgcagatcctcctcgacaacctccgccacagcttcttcaggctccgggacatcccgctcctcatcttcgacgagtgccaccacgccaccgggaattcgccctacgcctgcatttttaaggtcaccccgaaagttggaaccacgcttggctatttttgtcccccaactgaccctcttgtctgttggcatgcacatttattgatctggtttccacatatcgcagttcagttacaaattttaaggcttaagtttgcccacgtgtatcagttcagtatgtttgtatgtgtattggggtaggagtacaatttttggtggaatcatgaatgctcttttttggggggtaaatttcggtttcagtttgtcttggattctttcctttttttagaatgtatatccaacaatctagttaaatcttttatgtgtctttttctggtaggagttttatcatccccaactgaattctaggccatcagatcctattccaaggatatttgggatgacagcttccctaattaattcgaaaggtaaggttggggacaatattatttgtatatttatacgcctttaattaattaattcaaaaggtaaggaggcggcaatattatctgtatatttatttatatgtgcatttcattctctcattaattaactccactctattgtggaattttgtccacagatcttgcgcgtgacaaatattcaatgaaaatatctgagctcgagaacctcatgaatgcgaaggtcaggctatataagaacacccacacaactgtatttcagataatcattattatccctaatttgtaacatgtgacaataacttatgcatttccctttataggtgtacactgttgccagcgaatcagagctattgcaatacattccatttgcgactacaaggataatcgagtatgatgattatatcgtaaagtctgagttatatagccatactatccgttgcttggacaaattggaagcgaaggtactattatatactctaggcatggtcttttgctggacacagattgattacgttactctgcatcacccagtatgtaatgcagggatcgttttctgtgcattctgcattatgatattgaagtatatcattgtagactgtagagttggaatcttatgatttaagatactaccattcccagcaaaattatccagtcttgtttttgtaaacacattttctgtttgatgctgaaattgttaagagtgctacaacactctgtaaacaacattagtttattctggttcttaattataaatggtaagcattattacaccttatatatctggttcacagtgtaaatggtatcgtgaataattcttgtaagaataactaagtatgactgctgaactcaaatagtttagcaggaagggtaacactacatactggtaaggtggtttaatattagagtgaagtccatttgaccccatgaacttgtcattgggttcaaaaaaccactctcaactcaaaaactagaaatccagacaaattaccccatatagcagttaaaagtgtttttgagttatgttgacatttttttattcaaaaacaaatctggaaaacactggataaggttcttaataaaccatgaaaaatgataaggatcttaagcctcttaaaaaacccaaaaagatcatagagatatattaggacaagatatttagagcttttgaatgtttaaacatattttgaaaactttccacacaaaaacatgagttgcaaccagctttaaatgaacacaactagcactattgcgtgttgcattcttgctaattgcatctcatatttttgttgtgaaaagttttcaaaatgtgtttatacatcgcttagattgttctgggaattttctcatttttattggatgttttccccattttactagagctcagtccaattttaaaagctttcaatttcactggctccaaatatttcatttggatgtatcttgtcataatatatcacttggatttttttcttggatgtttcggaggcttgaagatatttttcgtggtttaaaaccttatatagtgtttaccatatttgtttttattataaactaaaaaaggacgatgtggctgaaaatcaccctcaaaactacttttaactgatgtagaagtaatttgtccagttctgaaagttggaggatgtaagagttctgtttttagttcaggtgttctttttttttttcagattcaacaagtttatggggtcgaatggactaaactctaaatattttttaaaaacactaaactctaaatattacaggcataatgctcttcgaaagaaatctgattatgttagaaatattcaaagtaatactcaaccttgaaggggtgttgaacaaatctgtattattcttttgttttgttataaatgtgcaactgtgccacaatcacaatgttaccatggctccatatttatattccaaaaaatgcagtagttgtactgatatccatattgctttctttatctagttttatgctcacaatggtgcaatgcagctttttagtacattttagtaacttctttcatcatgttctgagttgatatgcatatgaaataacagtggttgcattatcttagcatttagaaatcctgaagggcaaactgcatggttcatatttggaaaatgcagagaaaaggattaaaaaattaaatgcaatgttcttatattgcatatctgatcttggagtatggctggcagcaaaggtacgaggttatgtaatgtgcacatttttatcattcttatgcactcctaaaaatgctttaaaaccttttctcaggctgctgagattctacaatcaaacaaggaaagctgcgtatccttttggggtgaaaaactggatgacgaagttgagggattcattagaaactatattggtgacgtaaataatgaactgtcagaaattatattgaagatgacaaagaggggtttacaacgtaattgcatccttcttcctttcttgtttcttcaatgcacctcttcctaaaagttttcacttaatataaattactctgtgcaagttttctgccaatgctattcagtattttttactcagtgctgataagacttttcgtatctataacaactaaggtgtatgccaatagtaatcactttatctatccattaaataaaatactagactcaaccacggggagaagatggcacttcccccaacctttaggcaggggcacacgacctatgaacacctggggtttgaagtttgaactggggtgggcagcctctcaactgaaggctatttgtcgatttgacaatttgcattattagagatgcatttggccttagcgtgtgtttgaattataacactatcaaaaaatgtatgtggtgcggtttatttttgcattcttccaaactagattttgactattgttttcttacataagaatattgtttatagatatgtatgactctatttattttttcttctattaatacaatgatacgcagctctcctgcgtgttcgagaaaaaaaattgtttatagctacaaaatcaatatagtgcaaaagcattttttttgaatctatttatatgatatttataccaaacgtaccttgactaaatattggtcaaaataaacagtttgaatcttcttatagcatgcaaaccctacctgattatgtatgatctcatatttaatctgtctatacagggcatattggtgaggactttgatgcggatttgcaagatgggttattgaaatccaaagtttattttcttatcaaatctcttttggagtataggtgagaaaatgcttggatcttaagtatgtatagtttactctcattgcctttgaagtagtgatttgactacaacacatgtctaaattatctcgacacccaaatcctaaaccacagtgctcaccataccttcaaatctaattcagctaaagttgcctattcaaataaatgtacgctagcttatcctattgatctggtatagttttatgaactgaatggctagctggatgattactgccttgcacatatcttgatgtcatcatggtccatgcactgcggctctgcatatggccatatggtataaattgctaatgaaatgatacggccagctgcaaattattctctcttgttgtaaaccatgaatgattaatctcctgctccctcttgcaggcatgtgcaagatttgagatgcattgtttttgttaagagagttattacaagcattgtgttggaggctcttctgtcaactattaatcaaatgtctggatggagtgtaagatacatggcagggaaaaattttggtttgcaatatcagagtaggaatacgcatgtggaaattgttgattcatttcgaagtggaaaggtttgccactaatgttgccctgcagtggtcatgtcttattaataattgtactgatgataaaatgatatcctgtaggtgcacctaattattgccacacaaattttggaggagggactggatgtgcccagttgtaacttgataatccgctttgatcaggcagcaactgtatgcagctttatacaatcacggggtcgagctaggatgcaaaattctcactatgttttacttattagaaggcatgttttccagttttgtagctgttgtttcgtgagcaatttttttttgtactttcagcttcatgaatttcttttgggtccacagtagactttgtaggatcacacttttggtcactcaccgtggacacttggtccttttgttgagtagaatgtggatggtggttgtctttttgatggcgtccgtgacacgtctgttttctgtttcgacgggtgtgtttgggtttgtttgggagcagactccagcctttcctttgtacttggagtaggcacttgcttctccttgtgccttttctccttaatttttttcgagaacgtgcgctgcatgtatttcattaagcagagaaatagagttcacaacccaaacaacacccggtaatccagagattaccgcagaaacttggacccaaactcacacgctagccttttctccttaatgaaatgacatgcatatctcttgcattgtaacagaaaaaaagtagactttgtcagatggattccccaatcaccaattgaattgcatgtatgggataaagaacatgtagtttgttgcatttttttagtgtaggcacaacatttcctgttgaattgtatgttgtgaattgctaagtgcacatttagtctcagtggattaatctgcatgccagtgcaactgatggtgatacgagaaacaacgtgaaggaccaacattagaaaaaaaacctgtgttttgttcatggtggtactgtcttcatatgtttacaatcgttagagatttgagatattgttcatggtggttctgttgatttactatattcagttaaggaccctgtaatctcacatttgttgtcaacattgtggttcaacttatttgagtgatattgttggattttgcatattgctttacatgatcattgagttttttctatgcttctgtatcaggggggacgccaatgctctttctaagacagaggagtttctcgaaagtggacaaatcatgcgtgaagaatctcagagattggaatctactttttatcagcctcttccaaacaccctatgcaatgaagaattttatggtgttcaatctactggagcaattgttactctgaactctagtgttcagttgatttactttttctgctcaaagctaccttccgatgagtctgttttctttcttagattagacaatgttttcttttggttcatacaacaaaacatttcctggtgcaaatactaacagtttttatcaacatatgccaggtattttaatcctctaccaagattcaatattgacaaggcattaggtacatgtacgctgcatcttccaatgagcagtcccgtacaaacaatttatgctgaaggagaaatttctatcatcaagagggttgtttgtcttaacgcctgtcgtgaattacatgctgttggtgctctcacagattatctcttacccgaatcgagtgttccatgcgaagatgaacctgacattggtattcctatttatttgttataacaaaaaaatgaatcaagacttcatttaattgcagttattatttttttttcattgtgactgcttacatacgttggataccatttccttcagtaatgatatacttgcagttttatctgagttatatttgtactatccaaagcttctaaactcaacatacatatcttaggactttgggcaattgtggagggtgggatcacacatagggcacgactacagtgagtggtgtagggcagggagtggtatggctttagagagactattattttagctaaggtcatctgatgcttacaacagcaaaatggcttatagtgggtatgctggattcagaggaaacttcattttgtaggttcagcatagaatgtttgatcggttatgaatttccacatttatcaatgtaactgttaagtttcaattgcaatgtaggggtgagtgattagaaatatcaagttttgtgtatggctaggatccaaacagtaccattttcttgtcgggaattttcatccctgcctgaaatgtgtatgctagaaagtcaaaagtgtgcacactcgtttgatccatgttttcagttgggtaatcagtttgacatgcaattgaatcggtatattatactaagactgtattaactctggtgatgtagttgtggacaaatacaaggaggagcaacctgactactttccagaacaattaatggataattggttgtctttttgtcatcgtggcttatattattgctacaagatctcactggaaggttgttctgaaacaactactccagctgagatagtattagctgtaaagtgtgatttgggatctgacttcatttcaaccacattcaaattgtggggtgtgcaagactatttgagttttaccataagatatgttggtgtgattcatctaaatcaagaacaggtagctattctcttcatataatcttgttctgtagtcaccataccatcctttctttttctcttccatagatgaaagtattttgggcccttcattatgaatacacctctcctgctcaggtaattgtcgccagaagatttcagacaagaattctttctttgcttattagtaaggacctttccgaagacggcaattctattaagagtttacttgaaatgcaagtatcttctggagctgtgtatctacttctgcctgtagtttctggaaaaattgattggtgcagcatcaaattctcatcctcagaaatgcatgaagatactatcatggatagtagacacagccattcttgtaaagatactggtttgctgcagacaaaaggtggccctttctgcccatgcatgcttcaaaattctattgtctccaccccacataatggcatgctctatgctgtttctgggcttcttcttgacttgaatgctaattcgcctatgcgtgagagtgttcttagctacaaaacccattttaaagaaaggtataagttttgtctttcctttggtattctttatgtcatgctcccataagctgtagaaataatctttatgtatcttatttcttgttttacattttccagtcatggccttgacttaaaatgtgaagatcaacctctcttgcgtgccagtaaacttgtgaaagtgcggaacatcctccatgagcgcaactataaaaaagaaaaaggttcctttcttttgagaagagtatttaaggcatatccatcgggctgcatattataccatgtgctgtatcaattagtttgcgctcaaattctgggagatggaaagactgaaaacatgggcttgtgattttcctaactgttttctcttagacgtgagcctcacatttgcaaaagctagcataattgacttgtgggacatgggtccatgagtacataatgatcttttgggcgcatgttgattgtctggcaacattggctacacgatagaagatgaaagagtttcaagtgttaaaaagatttcctttttttttctgtcttatatctatgttcttaatactgagtttatctgtggttactaacaaaactacatatttaattagtggatttacattgtaaatatgagtatgagagtatagaacaaaacctttttgtcacaggcagtggcggagcttggacctaaatccagcaggggccactaattaaagaataaggctaatctttagttttgttcaagccaaatggatgcaattatatggattttacataagttcaggggtggccatggcccctattggtctatgagaagcctcgccactggtcacgggtgcacatgtaccaaggagtaagggtttgggtgttatagtgtactcagggtttctactgttctctcttctctctaatacaaagatagacagctctcctgcatagtcaagagaaaaaaatacactgacatcttatagctgtttcagttatggatatgtgtcatatgaattaaactcacttctcctttttgaaaacatttttttcagcaatgaatattctactatataggtcttaataaaactatagttgattggttacttatgagacaggataaatgccacacatttcagctttaagttctcttagaagcttctagaattcaattcaatatcacaatggttgtataggtagacagttctatagcagaacttgtttaatgtgtacatgtatatttcaagtaactgtagtagtttggaggctcgaatttgtggaaactacattttttttgtcttcattagtgcattatatatattttaaattcatcgatggtttgctcataggtaccatttgtgtacaaaatttcaagaaactacatttgtctcctctcaagattatataaactgatcaaagaataaaggagatatgccaatttcatgtcctttttctactgagcatagcttagcaagcttcttagagtaagggagtcagaagcttcatacttgcagaaaggcctaatacctgtttgtttgcctctctgtttttgaggggtggtttttggctgacctgataagttggcagtcttttttttttttttggggggggggggggactttttgactgaattctaattgtgggccagaatatctctaatatcctctactaaaaaattggatggttcaatttatatacaattttaaattgagttttttatactactataattaaataacttgtttgttaaatgactgattccattatcctgtttcagaaagtacaaatgtgtttgaattgccacccgagctctgcatagttgtcatggcgccagtgtcagcaaataccctgcgctgcttcacatttattccttctataatgtatcgtatccaatgtatgcttctttctgtgaatttgaaaacgcaattgggtccaagcatgaagcagttcgatattccagcactaaaggttaaattcgatagcagtttttctactttatgcacatccataatgttttagaaaatgtagctgctaaatcagcttgttgttctctagatgcgagaacagagctattggtttcccatatacactgttttattagtctattgctttgttaaaataaagattctgttcagttattcttcagttattgcatcatgtgcatcggttcttgtcataatttttcttctccgaaacaacttgtcattatgtttcattcccttgggatgatttttctatgagtgcttccattagttcagatcctgactctgcaaataggagctagaaatttattgttacttaaatataattttacattatataaaagtattttcatgacaaacctaggaatgtcgaccttatcaagtcaatctatatgattatttagctattgatggttgaatctaaaaagtttttgacataagagataagagtttataagacgttttgacttttctagattataagacgttttgacttttctagatacattgcttttactatgtttttagactatgtatatctaagtgaatagaaaaatgtatctagaaaagccaaaacgtcttgtaatttgcaatggagggagtacttatttgggatcagagtatcttaaactgatcaagatgcaggatatgcatgctgcttcatattctcttcagaaattttcagtgaaattatttgttgtcaccagcgtgaatattcttctatgcacattgtctgtacaagggttctcttttttttactcattcaatggcttgcaggttctggaagcactaacagcaaagaaatgcaaagaagaattttcgcaggaatcattagaaacacttggagattctttcctcaagtatattacaactcagcacctctttagcaaatacaaacatcagcatgaaggcatgctaaccaagatgaagaaaaacttgatctcgaatgctgctttatgccagctggcctgcagtaacaatcttgtggtactctttcttaatctgatatttttttcttgtttggaatataaggtcctctttgtttacatgagttggtcctagaatcgtcgatttgaaaaatggaattttctgaatacagctgtttggatcagcttagaactttaattagaaatggagtctgattgtatcacttgagagcaactcccaataccaagctctaaccttctgaatagcactgaccacagctcatcaactccacctagtctctccatgtacaaccagacaccagacaacttccatctccagtgagcttgtagagaattagggaaacacctcacacccaattagagctccagcagtctggccttaagccaatgctggtgaaattgctagtgaaaaactagacctgcgggggtgtgtaagacagccctcgggcattttgctaagaagaaacccccgaacccctaccccacccatacatagcggcaccgtagcccatgtgagaactaccacaatcagggccggaccttatacctgtactttagcgtggggtgggactgacgggaggattttttaaccctagcctaaaatttgctcccacggggagtcaaaccaagggtctgaggagtgctaatcaagtcacctaaccaactcagctcagctagaggccctttcgcggtgaaattgctagtgacatccactttatttgcctctgacaactttctccttcctcttcgagcacacactggtccatatccaatcaatgccaccactggccattgcttcgtccttttcactggcagtgaggcccacactgctgttgttgactggaattttccagggcctgggctttcgctgctgttgtcaattgtggaatattattcctcctttggcgctcagaccaggcaaaggtgtgagcgtgtggcttggggcctgggatcatggagctggccattcttcctggcagacagacttagattgtgttagaataggcgccctttgggctgttatcggcctaatgccttagtggttaagttagattgataaggcaaggatcaccgttatctgggtgtttctataaacccttaggggatccttgcctatatatgtactctgtactcttgattatcaatctactaatctcgagacctattggctctcagattgcaaaactttggtgacttagatttcacagctttggtgtcgttgctcatgtatgtaagcatgggcgcatctttgatgcccttgcctgcggtactgctgctcccatacagcattgggtcatgtgcattgaggtctttggctctgagcatggacaaaaacagtatggcctcatggcttgtcaagcgcacatctggtcgcccaactgcaccagatcccaagccttcacatcctgcaaggctcatttttcatgccgtctttcgaatgaaacagtgtatggaatggattttattcagcgatttcctctataaccagacagaagaattgaattcaagcctgttttcatttcctcctatattcaatttggagcctcatttgaattcatccaatccaattcaacaaattgagcctaatacttttttagtgtgttaggtttttgttgataatcattgaccccaggtcctcctcctgtatccgttatccaaatattccttctaatcaaaattgtttaaaacactgacatggtccctaaagttgactcctttttgcacatttgaggtgtctataagtttcaaagtttttgcatgcatgtatacataaaaatctttttggcaactccatacacaatcgccattgacaacgacatgcttaccagtagcctggtgatcagtaaagagctgattgaaatattaaaatctgtttagataattctttaccaatcagccactaacacaatgtgtctcagtgttctctgttaaaacttggttgtatcatttatttgcattttcttgttgtacagtgtgtttatctgtaccatttctgcatttgttgtgcctttttctttgattgcagggatacattcgaagcgaaactttcaaccctgaaacgtggattattccaggggttggcaatgactcatgtggtaggagtctgaggaagcttaaaagtaagaggatcgcagattcagttgaagccttaattggggcatatcttagtgctgctggtgagcaggcagcgtatcttttcttaaaatctttaggaatggatatagagtttcacaaaatgccagttgaaaggaaaattacaatcaatgcggagaacttcattaaccttagaagtttggagctaatgcttgactataatttcagtgatccatcattgttgttggaagcactgacacatggttcatatcagattgccggcactactgcatgttatcaggttggtctagaagccaccaaacacctctctgtttcagattagttaatttctatctattttcccaaagatccctgtctacttcagcgtagaggcttacatccagtattatcacagttgggagtatctttatcattaataattaccttgcattctattattcacttacaagttacaacctagtttcatgagatgaaaatcacagtgttgtggggtaccccaacctctaggccattgagaatacaaatattctattggtatatatatgggtgatttgttaaaagcattattgtcttcagggggagtctaccaaatgcccctggattttatcatgtgtcttggggcaggatgggactcctctagcacccaagctccttcattttatccacgagggcaagagcaccattgcttgttcagtctcttcacttgtaacttaattcccctctctagttcgtgtagtttaaagggtagggtacaaccctctgtttgacctgtaaggacagcacagaaagcataatcaaggaagttttgcaagatagtttacttaggctagaaagataattcatagcctcctaacagtggatggaaaacaccaacaaacttgaactatatgttctgtgtattctaagaggactagtaaaaacaagctgaaagcacgaggtaatgaaatacactattgtggatctcaatacgatgctcaagttgaattatgttgaatcctttgtggatgatgtaatattttagggtatctaaactgctgtaaaaaaatgtggagtatgtggtttacacatggtaaagtttttcatctttgagcataacatctgtaatgggagtgcatcctgcgcatagttctgctgactaaatataatgggagaatacttcatgggagcaccaaatttataaaaaaaaaccaatatttgtgtcaccaaataattatcattaggttcatcattagatatgttttcatagtatacttatttggtggcataaatgttaacaatcttctctataagcttggttaaacttaagctagtttggcaagctatagtgacatgttttttggggacagaaataatactacattggatgaggtgaataataatcttttgtattaaatgaatgcacagggcatcttttgttggcacagttcaatttgtttcttgcaaaagagtatctcaaagatactgttttattgtttcctatatttccacagaaaaagaatattcctcttagtgtgttctatcatccataataaatttgatactatcaaagtttataccaagcagcaggtaaccattatattgagttacttacagcttcatgcatttatgcagcggctcgagtttcttggagatgctgtattagatcatatttttaccgattatttctaccatcagtaccctgaatgcactccagaactgttgacagatctgagatctgcttctgtgaacaatagctgctatgctcatgcagcagttaaagcaggattacataaacatattctacattcatcatctgcactgcacaaaaagatggctgactacctcgacaagtttgagcagtcattttcaggtccatcacatggttgggaagctggcatctgtttaccaaaggtgcgtcttatttccttctaggtgctaatggtctaatattgtgcaacttttagcacactaatagtgcattttcagtgctctggtgccatgtttgggaggaaaacctggcctctagcctgagtggcagtaaccacctagactccctcagttatagattcttttcagctttgactaaatcctttcagaacaggctgaaacactaacgattaaatggttagttctttacaggactaccaactaaatcatatcattaaccaggaaacaattttggttataacaaaacagctaacaagtaggggctgttagtgccatagtggctcatgtagacctgctttgtgagtgagggtacgtgtgctaacttcatcccaaacctcgtgcacgaccaaggttaaactagggacggcactgttaaaacaatgtcggccagcaacattgcaagataacaagcaagttgaaaccctttcgtccagctttttaacacgtcaggtagccttccgccaccaggtctacttctcatctggttgtggagcgacacatctgacctaggcaatcttttgactatgttttgtgttcattctaaagctgattaccccaactaaaaagaatattttgtttcttgagaagcctttgatccaaacaaacataaataaaaaatatgccctaacatagtagaacacactgttgcatgttctccataggttgagggtaataaatgttaaaccacaaggtaacatggggcaaatattgattaatgacacccatcgtatttcctttttggaggaacatagtaaatttcaagtactctgggaccctaatcgtttgcttatttgcatacatgcaggttctaggtgacgtaattgagtctatcgctggtgcaatctacattgataccaagaacgacaaaaaggttgtttggagaaagatgaaacggctactagaacctcttgccacccccgacactcttgaaattgatcctgtcaaagagctgcatgaattctgtgatcctaaaacgtgcagtatcaagtacacagtagctcgtgaggaccgggtaacctcggtggccgtagaagtacagaccaaagggactacatacaaggccactcggacaggcctcaccaagcgtgacgccaaaaagttagcagccaaatccgtgctcaaagatatgaaggccgcgaatagcacgcagcattttgcaaatggtatcagctgcacttaa

SEQ ID NO: 820 - DNA, 7985 bp, Sorghum bicolor
  source 1..7985: mol_type = genomic DNA
aggtggtggagccgccggagtccctgtacaccgcctggatcaccggcgagcggcccctgccgccacgtccgcgacggcgatcctgatccggcgaccgcgactgcctgcgcatccggtccgggctcctccgaagtggacggcggcgatcgcgcggctcctcgcgcagatcctggtgcggctcctcctcctcaaacggctgctcatcccagagctctcgacgcagagcggcggccgtggtagcggcctccctggctgcggctgctgcggcctccgcggcttgctgcgcttgcgcggctgcggcctctgccgctgccagacgctgcgcgcgctgcccggcggctgctgctgcagcggcggctgctctctctgcggaggtggccatctcacaggatcaagaacacgctctgataccaattgttggataatttggtgaacacgagattgatctggcaacagccagagggcagtttgcctgctatggccttttgattgaattgcaaaaaatggatctcggttacaaaaccccttgccctgtctccagctcttataggctgagggctgcctcttggataggcatattctagagtagattcctagttaacttggctgccaagggtcttatcttcttgacccccaagcaagcctattacagccacataattaaaacagagaaggaaaacaaaactgcagtgggcaatacttaggccctgctatactagatacatgaccaactgccatcaatttttgccccccccccccccacccccacccccatgccccaaaaaaaaagaaaaagggaagactgcaaaaggggcaaacaatggcatctacagcagtgacagttaaaactgttacctgtacccagtactctcttagttagatatgaacgatactttcattagtgtgcagagtccagacggcaacattagcgactcaaagctgtgtgtggctgaggagatacataagtgctaaaacgtacagttgccagacagaagtatattaacagacgttagatgaccacttctgtgggtatgagcctaatagggttttcctctcagatctaaatgagcaatatcataattaccttatgattattggtgtcgggaccaaccaaatttggtattgccactaacaggtaactgagcaagtcctagtatcaaaagatctcatccatttgattgacacccatggatggctgtggcttatgcagtaccaagcaaactataacttgtctagttatacatatattggagagaagttcgttcaaccacttgttttattttattttactttcaactcaattcaactgtaaattttaatcagattcatgaactgcatgttaatgtatttgatctggtattttgctacttcctgcttttatggattttaagcactgagatgattgctgtgattctttgatggttctgatccttgtacagtacttttgatattatgttttttcttcactgcttcttataagaatctgagggtcgtgaattgatggagcactttgtggagttacctccagaactatgctctttgaagataactgggttctcaaaagatatgggtagttctttgtccttgctaccatctttaatgtgtcgcttggagaatttgttggtggctattgagttgaagaatgtcatgtcatcctatttcccagaggcttctcaaattagtgcctcgggtgtaagtaatactaactttcgcactgttgagccggaaacttctaatttcattttgttatctatgctgaagtaattgtgatttacgacattcattacagatccttgaagcactgactactgaaaggtgtttagagaggatctctttggagagattagaagtcctaggtgatgctttcttgaagtatgtagttgggcgccataactttatttcatatgaaggacttgatgaaggtcagttgaccaggagacgttctgatatagtgagtaattcaaatttatacgagttgtcaattagaagaaatttgcaggtgagttgattgtatcaatgatcccaatatttattttatgctaagttttatatagttatagcagttatttcatcctatcttattgtagaagagatccaatgtgcttgtccttgtgctgacatggttacatggtttgagtggttgaacctcaagcacaagatggcaaaaaagtttaaatcatgatttttttttcctggctatttatagacagacccacattgtgacttgagacttagtgttgcatttttttaacatgcaggagtacaatatcaaatatcccatgcaaaacaagttagggcatatgccgcagtggttgagaaagaaaacagacaaaaaaaaggccttaaagcgctttgtgtgtcctactaatagccatgctggagctcctttttaagaaccacaaaaaacaccaaccctgttcacatctagagaagcaccatagtaggctcctttgttgcagtatttccgtaactcccaagcaaccagaataaccaaggaattagatacctttttaagttgcttgttggcctgtttaatagcttggctccacaagggaaaagccctattgtgtcagcctgcagtgcccaccatacgcaagcccgtagatcacacaagaatcaggaggggctgcatcgtttcaggagcttgattacacagaaggcagtggttatttatctagcctatcagtggtccagcatcggttaacaattgccgatcacatgaaaaacttacaaagcagtggtgcccatgatttccaaatgcgttccaaaggcacaattacattcatatggcactatattcaagcaatagcctaggctcctcggctgttggtacataggcttgggctgctagggtgcaaaattaggcattgtaacttgattctgacttcttttgatggcatgatcgcacccagaagccacaatgtggctccacccctgcatcgaaaaccccccttgtccacccctgtgcaacttagctttgatgtgaatttgattctttcttaattaccatccatttctgttgaacacatttgtttctgtttctgatctattttatcatgtttcttgtttacattatggttattggccttcaagaagtttaagtagagaatcatgactcctgtactttgtgcacatgttttccctttatcacctcaggtgagaataatttgttgctcgctgtgttacacaaaattaaaacatcttgatgcaaaatataggtatacatacgggatcaacactttgaacctactcagttctttgcattgggaagaccttgtaaagttgtttgcaatcctgacagagaagcaactttacacccgaagaatatcgacccagatagacgtgaaaactgtaacttgaggtgtacaaaatcacatcattggttgcataggaagacaattgcagatgttgttgagtcacttcttggagcttttcttgtcgagtgtggattcaaagctgcatttgcattcctacgttggattgggataaaagttgatttcgaaaattcagctctctatagagtattagatgcaagctccaccaatttgtctctcatgaattacatgaacatttctgagcttgaagaattgattggctacaccttcaagcacaagggtcttcttctccaagcatttgtacacccttcattcaataagcattctggaggatgctaccaggtccgaccttcctttttccctttttatctaattgctagtgaactattctgatagtaaagaacactcacttcagcatattctgtacatttttaatcagaggatggagtttcttggagacgctgttttggattatttgatggcctcgtacctctactcagcttaccctgatctcaagcctggtcaactaacagatctgaaatcattagctttgaataataattcatttgcttatgtggccgttaagaaatctatccataaatatctcataaaggattctaaatctcttacggcagcgataaataaatttcagaattatgttaatctttccagttcagagaaagacttgttagaagaaccaacttgtccaaaggtatgtgctttccttgattctttttacttgctgcaaaaacttcagttatctttctatagaatttgtgaatcacctctttctcagtgtatttttcctacatttctttgctaacacttcttttattttctttgagttgaaacaaaaagtcacaattagtaattactgctaaaggagcttcttgaattttctatattccctctggttctaaatgtaagttgttgaggacaatgacagtctccaactattagacatattaggcaggtctatgcgtgattagctataattagcacctgctatgtacacttgattgtattccttgtatacccagccatattggctatatatatgaaggtcacccaccccccaccccccatattgcgtgtgaggtgtgtctttacatggtatcagcctatcagatcgtagttttctgcacttcccttccacacgcggcctcttcctgaccgcgctgcagccaccacgcgcgcgtctccctcgcgcccgtccaccctcaccggctgctcctcctctcctctccaatggacacatcgggctccctcacctcggcctcctccccggccaccggtgccggcaccctgccggcaacttccagcatgccctccatcggtgctgccccgttgggtgccatggccgccggcgctgctgcaccaatcgtggctcaccactacgccacagtaaatgtcaagtcccacatcccgattacgttggaccttcactccaactactccaagtgggcgttcttcttcaagtcgctgtgcggcaagttcggccttcgctcgtacatcgacggctctgctccccctcgacctgatgatcctcagtgggatgccacggagtgctgcgtccagggctggatctcaggctccgttgatgactccgtcctcgacctcgccatgaatgacgcagatccaaccgcccgcgatctgtgggtggccattgaggggatcttccgcgccaaccgggcaccaatgacactttgacttcctatttttttataaagttataaaagtatttttcatgatgaatctagcagcatcaaccatatattgccaacctatgtaaatatgttgatgggtcaagtcaaagtttgaccagctagaatcctaaaatagcccgcatttgggactgagggaatacaagattagagagtggaatttgaggtatagctattgcaagataaacatgtatttggaatcctagatcattcaagtataggattaattcaaaaacttctgttcagcctatgtaatacattaggaactcctttttgaaaatagattttctgaatgaatcatgtagtttattggagacaccttggtattttgtttttaatcaaagcttgcatgcttttgctgtaaccatgcaggttcttggtgatattgttgaatcttgtgttggtgcggtgcttttagattccggcttcaacctgaaccatgtttggaagctaatgctaatgcttctaaagccaatattgagcttctgtggcatgcacatcgatcctatgagagaactcagagaaatttgtcaatataatggttttgagttaggacttcccaaacctacggaggacaatggagagttccatgtcaaagtagaagttaacatagatggcaagatgataagctgtactgcagcaaaccggaattcgaaagatgctagaaaggtggctgcacaagaagcacttttgaaactgaaggtatatttgttttggcaatatgttatgaaatggaaattgcatgtttctctagcaccatagttttcatactcttgattttttttattaattacttagaaggcatggcaaaatcatcttatttgtggcaataatgcaaccttgcatgtttacatagaataatggatacaagcataaaagaaagtcactggaggaaattttgcgtgctaccacgaaaaaagaatcagagctgataggctatgatgaagaaccaatcaatgttgaggatgacatacaaatgaagaatctattgataaatggagaaatggaaggaaacatcttttttcaaaataaagaagtgtctttgaacgggaggtctgaaacctccattcagagtacaacaggagataacaaggttgacaagaatgatgctaataatggaaggaacaataagtccaatgtggtcgtgcagaatggttgtctacctagaggggcaactgataaaacaaaccaaagagagtatcatggtatggttctaaactccattttttctctctgtaaaatatgcttgtcatctaaagcttggaaatgaagcatgcaaggtgtcaactacagattccaaccagccagatgaacatgtgaagcccttaattacatttataaatctacagtagccgttggtagtggatcctttattggtctttttaatattcttatggcatctagatgcctgtggtgcttgtcaaactacgcatagacctgtgatacacacttaggataggaaatatgctacaaaaaggttctgcatggaaaaggggcaattgcatacaacctgggtgcttggctgataagccatcactgaaaatactgtgcgctgattgaaaaacactgccgaatggctggcagattcgcagataagctcaaatgaacaagctcaacaccatagtgtatacttaggccctgtttagttccccatagagtacaaaatgcaaaatggcaactactttggaatgatgaaatataaaatgccaaaattttcagggttatgtttagtttcatccaaaatgccaaagtttttagggttaggtgggggtagtgaaggctctttgggtttttttttgccctcttgaggccaaaatccaaaatgacaaccattttgctaaaaattttggatggtgcttagttctattcagcaaaatggtgagccaaaacccaaaattttttggctcaaatgaggaactaaacaggccatatattgcctagaacataactagtatccataaagtgtgcactttattttaaaaacatttttgaatgaaaagttacaaaatttatgactaaactatacaataaaacatgtttggcggttatgttttgcacgtgaaatgtgaccatattgtgattttgatcaattttggaggtaatatctttataatattgtttagtactcctaccttgacaggtgacatggtacgcaaaacagcaaggtcattcctttatgaactatgtgctgcaaactattggaaacctcctgattttgagttatgcaaaggtgaaggaccaagccaccttcgaaagtaagctcatctacttactaaatatctgagcgagaaaacttatagacttgtatcttttacaatcagaattctgtccttgaagctggaatgatgtttgtgttctagcttcaaggagtggtaattagcgtttcagttttggaacattggctaaaataactctgttcatgcagttttctatattagcaaagctgaaatatatctatcattgtacgttttggactatattgcttggccaactattctaagtatgggaaacaatgtcggtgtcgagtgacgtatgatttatgtctttttacatgcaggttcacttgtaaggtccttattcagatcacgggaacttcagcgacccttttggagtgctatagcgatcctaagctacaaaagaaagcagcgcatgagcatgcagcagagggagctctgtggtatcttaagcaacttggatacctaccaaaagatgattatcgtgtctagcgacattttaggtttgtggccttcagtgggaagagttttgttattgtaaataggcctcagatggaagagttttgttattgtaaataggcctcagatggaagagtttttttattgtaaacatgcattttgttcagagatatattgacacatacgaagctcacataggataagaaactagcaaatacttcctctatctcaaa

SEQ ID NO: 821 - protein, 900 aa, Sorghum bicolor
MESHNGEADDLPPPPPLNAGVEPLKADETKVPLKHRTLVQRNGFGRKGQQIKLLTNHFKVSLMNAADYFYHYYVNLKYEDDTPVDRKGSGRKVIEKLQQTYAAELANKDFAYDGEKSLFTIGALPQVKNEFTVVVDDVSTGKTPANGSPGNDSPPGSDRKRIRRPYNTKTYKVELSFAARIPMSAISQALRGQESEHTQEAIRVIDIILRQHSAKQGCLLVRQSFFHNNPSNFVDLGGGVVGCRGFHSSFRATQSGLSLNIDVSTTMIVKPGPVIDFLLANQKVNHPGMIDWAKAKRSLKNLRIKTSPANQEQKIVGLSDRPCCEQLFTLKHKNGNGDSEEITVYDYFVKNRGIELQYSGDLPCINVGKPKRPTYFPVELCSLLPLQRYTKALSTLQRSSLVEKSRQKPQERIGVLSDVLQRSNYDAEPMLKACGITIARSFTEVDGRILQPPKLKAGNGEDIFTRNGRWNFNNKRLIKGSSVEKWAVVNFSARCNVRDLVRDLIKCGGMKGIMVEAPFDVFEENPSMRRSPAVRRVEDMFEQVKTKLPGAPKFLLCVLAERKNSDIYGPWKKKCLAEFGIVTQCVAPTRVNDQYLTNVLLKINAKLGGMNSLLQIETSPAIPQVSKVPTIILGMDVSHGSPGHSDVPSIAAVVSSREWPLISKYRASVRTQSPKMEMIDSLFKPRETEDDGLIRECLIDFYTSSGKKKPDQVIIFRDGVSESQFNQVLNIELQQIIEACKFLDEKWNPKFTLIIAQKNHHTKFFIPGKTENVPAGTVVDNKVCHPRNFDFYMCSHAGMIGTTRPTHYHILHDEIGFNPDDLQELVHSLSYVYQRSTTAISVVAPICYAHLAAAQVGQFIKFDEMSETSSSHGGHTSAGSVPVQELPRLHEKVRSSMFFC

SEQ ID NO: 822 - protein, 900 aa, Sorghum bicolor; identical to SEQ ID NO: 821

SEQ ID NO: 823 - protein, 909 aa, Sorghum bicolor
MGSHDGEDEELPPPPPVPPDVVPIKAEDVVGEPPANKPIKPKRLLMDRPGIGRKGQLAQLYSNHFKVAVKSTEDFFFHYYVNLKYEDDQPVEGKGIGRKVIDKLQQTYRAELSNKDFAYDGEKSLFTVGGLPQKNNEFTVVLEDASTGKTAANGSPGGNDSPGGGDRKRVRRPYQTKTFKVEINFAAKVPMSAIGQVIRGEETENSLEALRVLDIILRQHSAEQGCLLVKQSFFYNNPSNFVDLGGGVMGCRGFHSSFRGTQSGLSLNVDVSTTMIVKPGPVIDFLLSNQNVNDPSRIDWQKAKRALKGLRIRTTPANAEFKIFGLSERICKEQTFPLRQRNGSNGDCDTIDITVYDYYAKKGIDLKYSGDLPCINTGRAKRPTYFPIELCCLVPLQRYTKALSTLQRSSLVEKSRQKPQERMTVLNDALQRSNYDSDPMLRACGVSVAPKFTQVEGRILQAPKLKAGNGDDIFSRNGRWNFTNRKFYQTCSVDKWAVVNFSARCDVRNLIRDLMRNASAKGIQMEEPFDVFEESPSMRRAPVSRRVDDMFGQIKSKLPGAPRFLMCLLPERKNCEVYGPWKRKCLAEFGIVTQCLAPTRVNDPYLLNLLMKINAKLGGLNSLLQVEASPSIPHVSEVPTIILGMDVSHGHPGQDRPSVAAVVSSRQWPLISKYRASVHTQSARLEMMSSLFKPRGTDDDGLIRESLIDFYTSSGKRKPDHIIIFRDGVSESQFTQVINIELDQIIEACKFLDEKWSPKFTVIVAQKNHHTKFFQTGSPDNVLPGTVVDNKVCHPKNFDFYMCAHAGMIGTTRPTHYHVLHDEIGFSADEMQEFVHSLSYVYQRSTTAISVVAPICYAHLAAAQVGTFLKFEEMSDTSSSQGGHTSAGSAPVPELPRLHEKVRSSMFFC

SEQ ID NO: 824 - protein, 487 aa, Sorghum bicolor
MESSGTKDGLNKAPILQRLPMSRPHGSGTKGNQIRLRTNHFKVSVHRTDVIFYHYNVSVKYEDDKPVESKGVSRTVIEKLQEIYLANVDFVYDGENNLYTMCALQNVEDAFMVVVEDGSSTKSARSRTPGGNGSPEGSDTKRMKRPMTCKTYKVELKSVGEFCKEKKSVGEIPLSAIDKVLRGQESDDCQEALRVLDIILRQKSAKQGCLLVRQSFFHSPSEPIKLGGGVVRCPGYHSSFRPTQSGLSLNIDVSTTMIVEPGPVINFILSNQYIKDPSRIDWGKAKHALRNLRIKTTHTNSEFKISSLSEKSCYEQKFLLKQRNGNGPDVVEITVYDYYLKHWDIRLQDSAIFPCLVVGKPKRPTYLPIESRICLQLSALPSSVTAKALQRINYNSDDILKKCGISIAPEFAQVDGRILQAPKLKAGDGQDLIARDGRWNFMNRKLFEAKGVHTWAAVNFTTRWKLQDLVRRLIHCGDNKGIVGLCF

SEQ ID NO: 825 - protein, 322 aa, Sorghum bicolor
MGIVTQCIAPSNKMNDQYFTNVLLKINAKLGGMNSKLALEHRQMIPVVTQIPTLILGMDVSHGSPGRADIPSIAAVVGSRCWPLISRYRASVRTQSPKVEMIDSLFKPLDDGKDDGIMRELLLDFYQTSQQRKPKQIIIFRDGVSESQFSQVLNVELNQIIKAYQSMGQGDLPKFTVIIAQKNHHTKLFQADSPENVPPGTVVDSGIVHPRQYDFYMCAHAGPIGTSRPTHYHVLLDEIGFSADNLQKLVLSLSYVYQRSTTAISVVAPICYAHLAAAQMGQFMKFEEFADTSSGSVNSSSSASIPELPRLHADVCSSMFFC

SEQ ID NO: 826 - protein, 913 aa, Sorghum bicolor
MAPSSPSPAAPTRVSGRKRAAKAEEIQEEEVVVASSAKRSRKAPSSGKKPKPTPKQAKPAKAARKKKGEAERKEPVEDDVCAEEPDEEELAMGEEEAEAAADEQAMQEEVAAVVAGSPGKKRVGRRSAAAGGDHEPEFVGNAVPAAEARSNWPKRYERSTAAKKPEEDEELNAKCHYRSAKVDNVVYCLGDDVYVKAGENEADYIGRITEFFEGTDRCHYFTCRWFFRAEDTVINSLVSINVDGHKHDPRRVFLSEEKNDNVLDCIISKVKIVHVDPNMDPKAKAQLIEHCDLYYDMSYSVAYSTFANISSENGQSGSETASGISSDDVDLEAPSSMPERTATLLDLYSGCGGMSTGLCLGAALSGLKLETRWAVDLNSFACQSLKYNHPQTEVRNEKADEFLALLKEWAVLCEKYVHQDVDSNLAGSEDQEDEGSPLDKDEFVVEKLIGICYGGSGRKDGIYFKVQWEGYGPEEDTWEPIDNLSDCPLKIREFVQEGHRRRILPLPGDVDVICGGPPCQGISGFNRFRNRDEPLKDEKNKQMVTFMDIVAYLKPKYVLMENVVDILKFADGYLGKYALSCLVAMKYQARLGMMVAGCYGLPQFRMRVFLWGALSSMVLPKYPLPTYDVVVRGNTPNAFSQCMVAYDEKQKPHLKKALLLGDAISDLPKVENHQPKEVMEYGGSPKTEFQRYIRLSRKDMLDWSFGEEAGPDKGKLLDHQPLRLNNDDYERVQQIPVKKGANFRDLKGVKVGANNIVEWDPEIERVKLSSGKPLVPDYAMSFIKGKSLKPFGRLWWDETVPTVVTRAEPHNQIILHPTQARVLTIRENARLQGFPDYYRLFGPIKEKYIQVGNAVAVPVARALGYCLGQAYLGESEGSHPLYQLPPSFTALGRTAVQARASPVGTPVGEVVEQ

SEQ ID NO: 827 - protein, 1586 aa, Sorghum bicolor
MAADPPPPPPPAQLPPPRRPHKQLQPRGYQVEVFAAALRGNTIAVLDTGSGKTMVAIMLAREHVLRARAGETPRRIVVFLAPTVHLVHQQFEVIREYTDLDAVECHGASGVGDWNAKRWKEAIGSKEIVVMTPQILLDALRHAFLTMCVMSLLIFDECHRACGNHPYSRIMKEFYIDSEWRPAIFGMTASPVSKRGASTIEDCEAQIAQLELVLNAKVYIVEDRNELESFSTGAKIVNKYYDPYLFDLDDLESKLQMLFEEVVKIYNESINTVGDSEDCLFSKASLNLQVSYFKEALFLIEEFLPQGYGELMKSESGSAELTKRGYVSSKVQTLINIFKSFGSSEEVLCMIFVERIMTAKAVERFMRGNVNFSRFSISYLTGGSTSKDSLSPAVQRFTLDLFRAGKVNLLFTTDVTEEGIDVPNCSCVIRFDLPRTVCSYVQSRGRARRSSSSYVLMIERGNLVQQEHIFRIIRTEYYVKTFALHKQPNTPSLDLPLQEKYMYHVESTGATITAECCVNLIYKYCEKLPKDRYYLPKPCFEVGLKDGSYQCALTMPPNAAFRSIVGPPSSTCNLAKQLVCLEACKKLHELGELDDHLVPLTEEPMDIDTDTTDKKCVSGPGTTKRKELHGIINVHGLSGNWIHESETVILNSYTFDFRCDQEGETFAGFVLLMESVLDDDVAHSEIDLFLIPNKMVYTAITPCGKIQLNKEQLRKGKLFQEFFFNGIFGRLFHGSRTSGLQREFIFRKGHEIQWGSDNMYLLLPLRNSSHIQHDLNIYWEAVESCSGAVEQLRNLYLEDGNLNHENLCSHKRSNKGEDIIHLANKSLHFSTVKDSVVLSLHTGRIYSVLDLILDTTADDSFDEMYNGKASPFSSFVDYYHQKYGIVIQHPGQPLLLLKQSHNAHNLLFSKMKYQDGSTGNPLLVEKEQIHARVPPELLIHIDVTTDILKSFYLLPSVMHRVQSLMLASQLRRDISYTQRIPSSLILEAITTLRCCETFSLERLELLGDSVLKYVIGCDLFLRYPMKHEGHLSDMRSKAVCNATLHKHGICRSLQGYIRDTAFDPRRWVAPGQISLRPFPCNCGIETAFVPFTGEYISDDPSFIVGKPCDRGHRWMCSKTVSDCVEALVGAYYVGGGITAAIWVMRWFGIDVRCDMELVQKAKYNSNASQLCYLSKLKVFEELEAKLKYNFSVKGLLLEAVSHPSLQELGVDYCYQRLEFLGDSVLDLLITQHLYATHTDVDPGELTDLRSALVSNENFAQAVVRNNIHSHLQHGSGILLEQVTEYVRSSLEYHGKENEFVQQATFKAPKVLGDIMESITGAIFIDVNFNVDLVWKIVEPLLSPMITPDKLALPPYRELLELCSHLGCFIKSKCTSKGEELIIEMTVQLRDELLIAQGHDRNRKSAKAKAAARILVDLKKRGLSLKQCFSKAKQLDIVSSELQSELISLESRYDCPDVNGSLSLEGLSSVRAAVVLPLKMDKGGPRTALFRLCKRLQWPIPEFEFVEQRFRTPIVLDGVTTTNFNSFVSTITLHIPDVTVITLQGERRTDKKSSQDSASLVMLQKLEELKVCICKQTQQSNMDNNTS

SEQ ID NO: 828 - protein, 1651 aa, Sorghum bicolor
MNLLKRPSNSSPPEDETDKHKRQKRECQDFTPRRYQLDVYEVAMRQNTIAMLDTGAGKTMIAVMLIKHFGKISKANNDRKLIIFLAPTVQLVTQQCEVIKSYTDFEVEHYHGAKGVDQWKAHSWQQQFLKYQVMVMTPQVLLDALRQAFLILDMVSLMIFDECHHATGNHPYTRIMKEFYHGSEHKPNVFGMTASPIIRKGVSSDLDCENQLSELENILDSKIHAVVDREEIELCVPSAKEVNRYYEPRTVSFEDLSEELEILCSKYDGLIVQLHNRSTNQYKDADEITKESRRRLSKSLAKICYCLEDAGLLCASEATKICIERGQRKGWLKGGSDTTDQQSDPNGPILFAEISMLHMKFFQEVLDIIDKRLQQGIDALLNSESGCVEAAKMGYISPKLYELMRVFLSFSDSDNVRCLIFVDRKISARVIERTMKKIGRLSCFRVSFLTGGSSSVDALTPKMQKDTLDSFRSGKVNLLFTTDVAEEGIHIPDCSCVIRFDLPRTTRSYVQSRGRARQRDSQYILMIEKGNVKQSDLISRIMRSKTSMTEIASNREPEDSHRNFFPIEEINEYHISTTGAKITTDSSISVLNQYCDKLPKDKYYTPRPTFQFTHYGDGYECTVTLPSSAMFQLLVGPKARNMQKAKQLVCLDACKRLHQLGALDDHLSPSVEETPLEISSKSSISTSGTTKRKELHGTTKVLSMSGSWGSDKSVTKLQGYKLNFVCDQVDQKYCDFVLLIDTSIAKEAATLNIDLYLHDKMVKASVSPCGPLELDARQMEKTKLFQALLFNGLFGKLFIGSKASKTPREFILKKDDAFLWNKENMYLLLPVDSTQDSHKSVCINWSIVDIAATTVGLMRSIYSDGKHNLKDKLNHEKNDENFIRLANKSCKADDLKNMVVLAIHTGKIYTVLKVSDLCANSKFDGTSDKKEAKFQTFAEYFEKKYNIFLCHPLQPLLVLKPTHNPHNLLSSKNRDEGIILFFVGNVVENKNRANSLVHMPPELLIPLDLPVDVLRVFYLFPSLMHRLESLMLASQLRSEIAYTDSDISSFVILEAITTLRCCEDFSMERLELLGDSVLKYAVSAHLFMTFLNKHEGQLSSRRQETICNATLYRLGTERRIQGYIRDAAFDPRRWLAPGQLSSRPCPCECPVKSEVITEDIHRIDDKSIIIGKACDKGHRWICSKTISDCVEAIIGAYYVEGGLKAAFAVLKWLQIETLEEEQIMEALSSASVRNYLPKVDVVEFLEAKLGYTFQVKGLLIEALTHPSQQESGATYCYQRLEFLGDAVLDILITRHLFLSHKDTDEGELTDLRSASVNNENFAQVAVKHNLHQFLQHSSGFLQDQITEYVNSLEGSSMDRTSLLSSGPSRGPKVLGDIVESIAGAILIDSKLDLDLVWRVFKPLLSPIVTPENLELPPFRELNEWCDKNGYFIGIKCENRGDKTTAILSLQLKDLLLVRQGCGKNKIDAKAHAASLLLRDLEEKGLIIPKNASRVEQFEKNSGTRNHCNNLVDVMDTQNVAPPRQKELPVSSTAPGSVLDKPLVVKVKLSKGGPRVSLYESCKKLQWPMPMFEFVKVEPKNISVCSSSGDSSQKVAPQGYAFASTITLHIPNGDIISLTGDGRADKKSSQDSAALLMLYELQRRGRFQVQEV

SEQ ID NO: 829 - protein, 576 aa, Sorghum bicolor
MADRVGGSDDGDKSEWNSDGEVARSLDGAGSPIAPSRNKLKDAPGPSLLVNGAGPSASLVEDFVGMGLIKGNGDGGAESLLELLLAYKAIGNDPSLDKSSASVCGPRTICDDKDILANWDAHDASTSSDRDHASDDSGDEDFLQGLSQKDEKIESLVRMGFPKDEAEMAIVRCGQDAPMSVLIDLIYSSEASEDGYYGNFSGHEDDSFGGRKEKRKRSEDAEQGSSHDEPMPLPNPMVGFNLPNVSLRSVDRSLPSKAIGPPFFYYENVAIAPKGVWTTISQFLYDIQPEFVDSRFLCAAARKRGYVHNLPIENRSPLLPLPPKTIFEAFPHTKKWWPSWDPRKQFNCLLTSMAKPKLTEQIHHALAKCKDPPPRRVQKYVLETCRTANLVWVGLNKVAHLEPDEMEFLLGFPKDHTRGIGRPERFKSLGNSFHVDTVAYHLSALRDMFPHGMNVLSLFSGIGGAEVALHRLDIRMKTVVSVEISETNRFVLRTWWNQTQTGTLIEITDVQSLTTERLESCIRRIGGFDLVIGGSPCNNLAGRNRFHRDGLEGEQSSLFYHYYRILDTVKSIMGRM

SEQ ID NO: 830 - protein, 740 aa, Sorghum bicolor
MPVAYHQRPAHCWCCLAGAAREFLVETCLEIRRLPLSSKSGQSRDGGGRQSRPVAGAASCSSSSSATASQLPARRGRRRREGRSGRGSPRRGGADGDGRGEAAEVVRGGAERGCAVPLRPVPQPPEPLREGSGMAHWVSDGDGSDSFEWDSDGNGEEAGSFNTAGASSSAMASTNTDAPGPSRRVSQVANGNGKAGPSASLVQRYIDMGFAEEIVVKAIKDNGDNGADALVELLLTYQELGNDLNVDNGFASGCVPQTVDDSGDDDFLENWDDLDAGGRSTRVANSVDDSGDEDFLHEMSQKDNKIDSLVKMGFPEDEAALAITRCGQDASISVLADSIYASQTAGDGYCGNLSDYEDGGRNKGRFMDGNNKKRKRYGSQALGSRGPLDGSADEPMLLPNPMVGFSLPDQWPRPVNRDLPALAMGPPYFYYENVALAPKGVWTIISRFLYDIQPEFVDSKYFCAAARKRGYIHNLPLENRSPLLPKPPRTITVAFPHTKRWWPSWDPRQQFNCLQTCVSSAKLLEKIRVTLTNSSDPPPPRVQKLVLEECRKWNLAWVGLNKVAPLEPDEMEFLLGFPKDHTRGICRTERFRSLGNSFQVDTVAYHLSVLKDMYPEGMNVLSLFSGIGGAEVALHRLGIRMKTVISVEKSEVNRTILRSWWDQTQTGTLIEINDVQTLTSERIEAYIRRFGGFDLVIGGSPCNNLAGSNRHHRNGLEGEHSSLFFQYVRILESVKSIQRL

SEQ ID NO: 831 - protein, 608 aa, Sorghum bicolor
MAHCVGDSDGSDNFEWDSDGDGEEAASFNAAGASSSAMASTNADAPGPSTRVANGNGKAGPSASLVHKYMDMGFPEEIVLKAMKDNGDNGADSLVELLLTYQELGNDLKVDNGFASGCVPQNVDDSDDDDILENWDDEDAGGRSTGVANSVDDSGDEDFLHEMSQTDEKVYSLVKMGFPEDEAALAVTRCGQDASISVLVDSIYASQTAGDVYCGNLSDYEDNSYGGRNKGRFMDANKKRRKRYEGQAHGSRGPLDGSSDEPMPLPHPMVGFSLPHQCTRPVDRSLPSQAMGPPYFYYENVALAPKGVWTTISRFLYDIQPEFVDSKYFCAAARKRGYIHNLPLENRSPLLPIPPKKISEAFPHTKRWWPSWDPRRQFNCLQTCVSSAKLLERIRVALTNSSDPPPPRVQKFVLEECRKWNLAWVGLNKVAPLEPDEMEFLLGFPKDHTRGISRRERYRSLGNSFQVDTVAYHLSVLKDMYPQGMNVLSLFSGIGGAEVALHRLGIRMKTVISVEKSEVNRTILKSWWDQTQTGLLIEICDVQTLTSERIEAYVRRIGGFDLVIGGSPCNNLTGSNRYHRDGLEGEHSSLFYHYVRILDSVKSIMERL

SEQ ID NO: 832 - protein, 693 aa, Sorghum bicolor
MDFDMDDYIDPYEEAEAEAAAGEDDDSDDPDEDDSDAESDYEEKSFGLLKSGKHRVRNPDGTFRCPFCPGKKKQGYKIKDLLQHADGIGVSSKHRRHGRERANHRAFARFVRTDPDFAEDLVGITGIQGAITTTPADKNGGSANGDGKAKANGDTAGSSSVAAKVGPPQEVERFAWPWACVLAAGAGFNPEEFADRVAVFSLVEVVPLFVDEMEVTETFAIVRFTNDWSGFNDALTLENHFGVNKLGKKEFETRDSGLGSVEGDGGKGEVKVYGWVARAEDYDATSVVGRFLRKHTVLKTIDEVSKTELEKSGEMVAILASQIEEKNRYLQDLETKKNATELSISRLEDDNRKLHEAYNEEMRNLHRRARENAMRIFQENENLRIDLENKRRELNLRAKELEKMSAENANDRKTLDDEKQKAKYDNSELELASIEQQRADADVLKLLADQEREKEEVLARMLQLEKELHEKQQLELEVERLNGTLQVMKHLEGDDDGGDIHEKMEKLSVRFEHEKKRLEDLSGDLVRKERESNDELQVARKELIKGLEEELDGQTAIGIKRMGELDEKPFLNACKRKYGKGEYQIKAAELVTNWQEELKKPSWHPFKMVEVNGENKEILVDDDAKLKHLWIEYGDDVCNAVKTALMEINEYNPSGRYVVPELWNFRKGRKATMKEVLKYLFSQMDTTTKRRRG

SEQ ID NO: 833 - protein, 1080 aa, Sorghum bicolor
SELYRGVMAKHQRSGAATGTKKHKAKLQNGEYSIENEEIVTEHEAKTDSNDTTDEPVVRKRPKRAAACSNFKEKEMGLSEEDLIITIKESRVEEEEIEAVRLTKTEPEDRRPSRKLIDFSLHDADGNLQPFEMSEVDDIFITALIMPLDDGLEKDREKGVRCLGFGRIKEWIISGYNEGTAVIWISTEIADYKCVKPASSYRSYFDHFSEKARVCVEVYMKIAKSVGGNPQLDLEELLASVVRSINSNRKSGGTMSKDFVISNGEFIYNQLVGLDKMAASNDEILGTLPVLVALREESQSRVKFNKFSAMPSNGALKIKDEQHMGVGDNDDEKLARLLQEEEEWKMMKQRGKRGTSQKNVYIKISETEIANDYPLPAYYKSYNQEMDEYIFDSDIGIFSDDMPVRILNNWALYNSDSRLIPLELIPMKSDAENDTVIFGSGFMRDDDGSCCSTAESMQLSSSSSKSNQDLGIPIYLSPIKEWVIEFGGSMICVIIRTDVAWYKLRQPTKQYAPWCEPVLKTARLAVSILTLLKEQSRASKLSFAEVIKRVAEFDSVHPAFISSNTTLVERYVVVHGQIILQQFADFPDVSIQRSAFVTGLTLKMEERRHTKLVMKKKSQAMKGENLNPSAKMGPILRKKLMRATTTRFISKIWGDYYATHFPEDTKEGDGNAQKEIDEELEENEDDDDIEEDLNIEMEQAVKTPPSTRSSKSLKSCKEARWKGQIAGKTVSGEFLYKCVTFQDLSIGVGQSVSLEDDSGEAIMCFVEYMYEKHDGTKKIHGRILQKGVQTVLGNAANEREVFLTNDCQEFELGDIKELVTVNVQLIPWGHKYRKENSEVNSIEGEKAEARKRKGLPVEYFCKSLYLPKKGGFFSIPHDKLGTGTGSCSSCEERNQAGDEFKILSGTGFVFKNIRYNVHDFLYIRPDFFSQGEGYETYKAGRNVGLKPYVVCHVLSIDAPDGSNKAHPESTKINVRRFYRPDDISSTKAYTSDIREVYYREDTMSVPLTMIEGKCEVRMKDDLPNSNLPVIVEHGFYWELLFDPVXXXXXXXXXXXXXXXXXXXXXXXXXXXXXXXXXXNL

SEQ ID NO: 834 - protein, 1397 aa, Sorghum bicolor
MLTNEFSGTRRCRAKPQKKEKESTENSKLENGSQDATEEVHHGVEKGDGHVTRKRPRRAAACSDFKEKSIRLSEKKSVVMVKKNRMEEEEIDAVSLTKLGPEDPPPCRKLIDFILHDAEGNPQPFEMSEIDDFFITALIMPMDDDLEKERERGVRCEGFGRIEDWNISGYDEVCEGTAEEEDDDAKLARLLQQEEEWKMMKKQRGRRGTPSQKNVYIKISEAEIANDYPLPAYYKPFSQEMDEYIFDSDDSIFSDDVPVRILNNWTLYNADSRLISLELIPMKSGAENDVVVFGSGFMRDDDGSCCSTAESVKSSSSSSKADQQDAGVPIYLSPIKEWLIEFGGSMICITIRTDVAWYKLRQPTKQYAPWCEPVLKTARLAVSIITLLKEQSRASKLSFADVIKKVAEFDKGNPAFISSNIALVERYIVVHGQIILQQFADFPDETIRRSAFVSGLLLKMEQRRHTKLVMKKKTQVMRGENLNPSAAMGPASRRKAMRATTTRLINRIWSDYYAHHFPEDSKEGDGNEAKEVDDEQEENEDEDAEDEGQIEEDKISKTPPSTRSRKLLSQTCKEIRWEGETSGKTSSGETLYKCAYVRELRIPVGGTVVLEDDSGDTVMCFVEYMFQKSGGAKMVHGRILQKGSHTILDNAANEREVFLTNDCLEFKLDDIKELVSVDIQSRPWGHKYRKENSETDKVEQAKAEERKKKGLPMVYFCKSLYWPEKGAFFALPRDKMGLGSGVCSSCEHIEPDSDELKVLSKTSFVYRKVTYNVNDFLYIRPDFFSEDEDRATFKAGRNVGLKPYAVCQILAIPEGAGSKKLNPASANISARRFYRPDDISTAKAYASDIREVYYSEDVIDVPVDMIEGKCEVRKKNDLASSDLPVMFEHVFFCELIYDRASGALKQLPPNVRFMSMVQKATIASKKNKGKQICETDQIDSGKWLDVPKENRLATLDIFAGCGGLSEGLQQAGVSFTKWAIEYEEPAGEAFSKNHPEAVVFVDNCNVILKAIMDKCGDTDDCISTSEAAEQAAKLPELNINNLPVPGEVEFINGGPPCQGFSGMNRFNQSPWSKVQCEMILAFLSFAEYFRPRFFLLENVRNFVSFNKGQTFRLAVASLLEMGYQVRFGILEAGAFGVAQSRKRAFIWAAAPGEMLPDWPEPMHVFASPELKITLPDGQYYAAARSTAGGAPFRAITVRDTIGDLPKVENGASKLTLEYGGEPVSWFQKKIRGNMMVLNDHISKEMNELNLIRCQHIPKRPGCDWHDLPDEKVKLSNGQMADLIPWCLPNTAKRHNQWKGLYGRLDWEGNFPTSVTDPQPMGKVGMCFHPDQDRIITVRECARSQGFPDSYEFAGNIQNKHRQIGNAVPPPLAYALGRKLKEAVDNKRQEAGVGVPAP

SEQ ID NO: 835 - protein, 1203 aa, Sorghum bicolor
MELHRELPEATLNAIKFDLMTSTDMEKLSSMSVIEVSDVTSPKLGLPNASPQCETCGSKSGRDCDGHFGVTKLAATVHNPYFIDDVVHFLNQICPGCLSPREGINMKKDGSKLYPSVIFKTLSSPRVLLSKSKLHRSPSVMERISIVAEAAERVSNRSKGKGLLEGLPQDYWDFVPSENKQVQSNMTKIILSPYQVFHMLKKSDPELIKQFVSRRELLFLSCLPVTPNCHRVVEIGYGLSDGRVTFLYSKKTDGETSTDPSGMKWLKDAVLSKRSDNAFRSTMVGDPKIKLWEIGIPEDLASNLVVSDHVNSYNFENINLKCNLHLLTKEELFIRRNGKLMFLRKADQLEIGDIAYRPLQDGDLILINRPPSVHQHSLIAFSAKILPIHSVVSINPLCCTPFLGDFDGMKFSCDRMLHILNGEVLTCSLGSSWLQNNTSGLFSVMFKQYGCKALDFLSSAQEVLCEFLTMRGLSVSLSDMFSDHYSRRKLTEGVKLALDEAEEAFRIKQILLDPINIPVLKCQDETEDVTYRQSDCIQNNPSVIRSSIMAFKDVFSDLLKMVQQHVSNDNSMMVMINAGSKGSMLKYAQQTACVGLQLPASKFPFRVPSQLSCIRWNRQKSLNYEAEGTNERVGGQNLYAVIRNSFIEGLNPLECLLHAISGRANFFSENADVPGTLTRKLMYHLRDIHVAYDGTVRSSYGQQIVQFSYDSADDPEVFKCHKATNSGDHIGLLFLSRHLKKYRYGLEYASLEVKNHLEQEMMKKKRLGLRFVIEELTKEYNATRDQLKNAIPSICISRRKCVVGDEGVKISACCIAVVALAEPNSMSQLDTIKKRVIPIILDTLLKGFLEFKDVEIQCQHDGELLVKVCMSHHCKGGRFWATLQNACIPVMELIDWELSRPSNVADIFCSYGIDSAWKYFVESLKSATTDIGRNIRREHLLVIADSMSVTGQFHAISSHGLKQQRTRLSISSPFSEACFSRPAQSFIDAAKQCSVDNLCGSLDAIAWGKEPFNGTSGPFEIMHSGKPHEPEQDESIYDFLRSPKVQNVEKNHLDTRRQSTENASICRLACKSKGSATVNGVAITSDQDFLHAKVSIWDNIIDMRASLQNMLREYPLNGYVMEPDKSKLIEALKFHPRGAEKIGVGVREIKVGLNPNHPGTRCFILLRNDDTTEDFSYHKCVHGAANSISPQLGSYLKKLYHRA

SEQ ID NO: 836 - protein, 554 aa, Sorghum bicolor
MRTLFISKGSGFSSRSVLTGDPYIGLGVVGLPSEVAKRMTFEEQVTDININRLQEVVDKGLCLTYRDGQATYAITVGSKGHTTLKVGQTISRRIVDGDVVFLNRPPSTHKHSLQAFYAYVHDDHTVKINPLMCGPFSADFDGDCVHIYYPQSLAAKAEALELFSVERQLISSHSGKVNLQLGNDCLVAMKAMSDRTVLHKELANQLAMFVPFSLLAPAVMKPIPSWTITQIVQGALPAKLTCQGDTHLVRDSTIIKLDLDKESVQDSFPDLVSSILREKGPREALQFLNVLEPLLMEFLVLGGLSISLRDFNVPKALLEEAQKNIQNQSLVLEQSRCSTSQFVELRVENNLKSVKQQISDYVGKFSGLGLLIDPKKEASMAKVVQQVGFVGLQLYREGKLYSRRLVEDCFSSFVNKHSAIGDEYSPEAFGLVQSSYFHGLNPYEELVHAICTRETMIRSSRGLSEPGTLFKNLMAILRDVVICYDGTVRNICSNSIIQLKYGEDDEADSSSAVPPGEPVGVLAATAISNPAYKAVLDSSQSNNASWESMKVVKL

SEQ ID NO: 837 - protein, 1228 aa, Sorghum bicolor
MEELQKDGGQQSNGSDSEPEAMVLDDNGAGKSHSMDGNRDSPVDVDEGQSSMDVDTKGKPSLNDDVNGKSSEPYSNAPIDLSVESLEKFCKEASRSFFDEVGLISHQINSYNDFVSHGLQELFDSLGEVIVEPGYDPSKKGSGGWKHAIIKFGRVKLEKPVFWTGKDEGSVDFKPWHARLQNMTYASRLIVEVNIQVYSLEKSDKSKTGNDGFVQKRDFMNETHWIFIGLLPVMVKSNLCLLHSLKESECLFDAGGYFLVKGMEKVFIAQELRCLKRLWIIDRPCWMISFMSEMKRRRIYIKLVESTRSEDFSGSKIISISFLYATMPVWLLFFALGISSDKEAFDVIDMQDCDASVINTISATIKESDELCEGFRKSDKARQYVDELVKSSRFPPAESFDDYIARFLFPDISGNRNKALFLGYMVKCLLMAFTGKRKCDNKDDFRNKRLDLPGELLGRELRAHLRLAEKRMVKAIQRDLNSDRELQDLERYIDASIVTNGLSRAFSTGSWCHPYKRAERCSGIVATLRRTNPLQMMSDLRKTRQRVAYAGKAGDARYPNPSYWGKLCFMSTPDGENCGLVKNLAVTAIVSSRVVQPLIESFISCGMSKLNDIPTEHIQRMDKIFLNGNWVGSCKDSASFVFRLRCMRRSSLIDPQVEIKRDKHHKEVRVFSDAGRILRPLLVVENLKKIRKPKGRSFSFQELMQQEIIEFIGVEEEEDIQCAWGIRHLFESEGAISSYTHCELDPSFLLGLSCGIIPFANHNFARRVLYQSEKHSQQAIGYSTTNPHIRVDTLSHQLYYPQRPLFKTVIADCLGRSDYTTFGRKDDFMRPEYFNGQNAIVAVNVHQGFNQEDSLVMNRASLERGMFRTEHLRSYKADVENKDGTKRLKLKEKIDFGKTESKRGRVDNLDDDGLPYIGASLQTNDIVIGKVSESGEDHSIKLKHTEKGMVQKVLLSANDEGKNFAVVTLRQVRTPCLGDKFSSMHGQKGVVGFLESQENFPFTHKGIVPDIVINPHAFPTRQTPGQLLEAALGKGIACKGTMRYATPFTTASVDVIAEQLHRAGYSRWGTENVLNGRTGERMQSLIFMGPTFYQRLIHMSEDKVKFRNTGPVHPLTRQPVADRKRFGGVKFGEMERDCLLAHGSAANLHERLFMLSDFSQMHICQTCERVANVVMRSVSGGKKIRGPYCGFCKSSENIVRINVPYGAKLLYQELFSMGICLKFDTEVC

SEQ ID NO: 838 - protein, 1239 aa, Sorghum bicolor
MEELQKDSGQPSNGSDSEPEAMVLDDNGAGKSRSMEGNEDSPIDADVGKDSPIDVNEGQSSMDVDIKAKSSLNDDVNGKSSSEPYSNAPIDMSVESLEKFCKEASRSFFDEVGLISHQINSYNEFVSHGLQELFDSLGEVIVEPGYDPSKKGSGGWKHAIIKFGRVKLEKPVFWTGKDEGSVDFKPWHARLQNMTYASRLKVEVTIQVYSLEKSDKSKTGNEGFVQKRNFMNETHWIFIGLLPVMVKSNLCLLHSLKESECLFDAGGYFLVKGMEKVFIAQEQRCLKRLWVSDRPFWMISFMHEIKRRRIYIKLVESTRSEDFSGSKVISISFLYATMPVWLLFFALGISSDKEAFDVIDMQDCDASVINTISATIKESDELCKGFRKSDKARQYVDELVKSSRFPPAESFDDYVARFLFPDINGNRNKAFFLGYMVKCLLMAFTGKRKCDNKDDFRNKRLDLPGELLGRELRAQLRLLERRMVKAIQRDLNNDRELQDLERYIDASIVTNGLNRAFSTGSWCHPYKRAERCSGIVATLRRTNPLQMMSDLRKTRQRVAYAGKAGDARYPNPSYWGKLCFLSTPDGENCGLVKNLAVTAIVSSRVGQPLIESFISCGMSKLNDIPTEHIQRMDKIFLNGNWVGSCKDSASFVFRLRCMRRSSMIDPQVEIKRDKHHKEVRVFSDAGRILRPLLVVENLNKIRKPKGRSFSFQELMQQEIIEFIGVEEEEDIQCAWGIRHLFESEGAISSYTHCELDPSFLMGLSCGIIPFANHNFARRVLYQSEKHSQQAIGYSTTNPHIRVDTLSHQLYYPQRPLFKTVIADCLGRSDYTAFGRKDDYTRPEYFNGQNAIVAVNVHQGFNQEDSLVMNRASLERGMFRTEHLRSYKTDVENKDGTKRLKLKEKIDFGKTESKRGRVDNLDDDGLPYIGASLQTNDIVIGKVSESGEDHSIKLKHTEKGMVQKVLLSANDEGKNFAVVTLRQVRTPCLGDKFSSMHGQKGVVGFLESQENFPFTHEGIVPDIVINPHAFPTRQTPGQLLEAALGKGIACKGTMRYATPFTTASVDVIAEQLHKAGYSRWGAENVLNGRTGERMQSLVFMGPTFYQRLIHMSEDKVKFRNTGPVHPLTRQPVADRKRFGGVKFGEMERDCLLAHGSAANLHERLFMLSDFSQMHICQTCERVANVVMRSVPGGKKIRGPYCGFCKSSENIVRINVPYGAKLLYQELFSMGICLKFDTEVC

SEQ ID NO: 839 - protein, 1251 aa, Sorghum bicolor
MDGDQSTVVLDTDMMDCLNFDGYGDVEDPRKEGAKGERQPSGKVDELQSTMDVDLTCIAYVEDEGNEKQNAMDVDLKEILPEEDEGKGKASSDIPSHVPVDFDVASLEKFCREASRSFFSATGLVSHQINSYNQFVSHGLQDLFDSLGEITVEPDYDPSNKSGAWKHATIKFGRVELSEPVFMVDNLDLEQQDLKFKPRHARLQRMTYASRMNVEMTAQVYILDKSDKAKTGKDTHVHRREIMTETKQVSMGLLPVMVKSNLCWLHKLQESDCQFDFGGYFLIKGTEKVFIAEEQRFLSRIWITDYPSWDASYLSQIKREKINIKLVPSKRNESCKVITIYFMGTIIPIWVVFFALGVSSDKEAFDMIDILDCDASIVNIISSTIKESHEEFEGFRAPGRACQYVDKLIRKSKFPPKESFDEYVCRYMFPSVNGVRSKALFLGYMVKCLLMAYSGNRKCDNKDDFRNKRLGLACQLLRRELWTHIKRAEWRMVKLMQRDLSNDGNLQDLRRYVDASIITNGLNRAFSTGSWRHPYLKARCSGVVATLRRTNPLQMMSDLRKTRQWVAYSGAVGDARYPNPSFWGKLCFLSTPDGEKCGFVKNLAVTAVVSSVVRKPLIDTFVSCGMKKLDDISLQDISGKDRIFLNGSLLGVCADPHELTLRLRSLRRSKLIDPQVEIKRDKHHKEVRVLCDPGRILRPLLVVENLRRITRPKDGLYSFQELIDQNIVELIGVEEEEDIQCASGIRHLFSGEKEDRSSGYTHCELDPSFLLGLSCSLIPFANHDNGKRVLMQAEKISQQAIGYSPTNSHTRLDTLSHQIFYPQRPLFKTVVSYGLGKAETAYSFGRKDDFNTPEYFNGQNAIVSINVHQGFNQEDSLVLNRASLERGMFRTLHLKSYKAQVENKEITRRLKHRESINFGKVQSKRGKVDSLDSEGLPYVGASLQSGDIVIGKVSESGEDHSAKLMHTEKGMVDKVVLSANDDGVNFATVTLRQSRSPCVGDKFASMHGQKGVVGLLDSQENFPFTCQGIVPDIVINPHGFPTRQTPGQLLEAALGKGIAMGGKVRYATPFTTPTVDVITEQLHKAGFSRWGEESVLNGQTGERMKSLVFMGPTFYQRLVHMAEDKVKFRNTGPVHPVTRQPVEDKKRFGGVKFGEMERDCMLAHGAAANLHERLFTLSDFSQMHICQACQRVANVIMRPAEGGSKKVHGPYCMFCRSAERIVRVNVPYGSKLLYQELFCMGICLKFDTEIR

SEQ ID NO: 840 - protein, 1128 aa, Sorghum bicolor
MSMAAPAPGATATVRVANIPASAIAAELLAFFDSAVTTTGAAFACEIAAAHRGWLSRGHGSVQFDSSAAAIHAIDLASSGRLPPFLGSCLSVSPAHADLLPRAPDLSLRAADAGLILGNRVAERELEAAYSWDGVRAEVIPRKRRVDLYLKQDSRSYKLEVLFEDIRECFGCHLDGTGAILLQLTYAPRIYTAISGSTVKSRFTDDRFHACKEDAKFAWVRALDFTPNNSFGECSTLVLKLSKGVPVSDILESLPFSGELEELAISSMLAFGSSSNVVPLVDCPNGFSVPYEVLFRLNSLVHMGKLVARHVNADLFKVLEELSIDTLRRIFEKMSKLKSTCYEPLQFIRHEAHSMSKSKKAFLSNKKDGGKLMRCYRIHITPSKIYCLGPEEEVSNYVVKYHSEYASDFARVTFVDEDWSKLSPNALSARTEQGFFSTPLKTGLYHRILSILKEGFCIGPKKYEFLAFSASQLRGNSVWMFASNNSLTAESIRRWMGHFEDIRSVSKCAARMGQLFSSSRQTFEISSYDVEVIPDIEVTSDGTKYIFSDGIGKISTRFARQIAKLFGLDPAHPPSAFQIRYGGYKGVITIDPTSFFNLSLRPSMKKFESKSTMLNITNWSKSQPCYVNREIISLLSTLGIKDEVFESMQQDDMHESDGMLTNKEAALSVLGKIGGADTKTASEMVLQGYEPSSEPYLLMILKAHRANRLTDIRTRCKIHVQKGRVLIGCLDETCTLDYGQVYIRITKNRKEQKYSEQPFFCNDDGKTAVIVGKVAVTKNPCLHPGDVRVLEAVYDPALDARGLIDCVVFPQRGERPHPNECSGGDLDGDLFFITWDDKLIPEKVDAPMDYTATRPRIMDHAVTLEEIQKHFVNYMINDALGVISTAHLIHADRNPLKARSPECLQLAALHSMAVDFAKTGAPAEMPVALRPREFPDFMERWERPMYVSTSVLGKLYRAALRHEENAEALLPAGPPRCVYDPDLEVAGFDKFLDTAEEQYEVYAEKLGTLMTYYSAEHEDEILTGNIRNKLVYLRRDNKRYFEMKDRIIAAVDALHAEVRGWLRARKEDDASKLASAWYHVTYHPDRRGEKRFWSFPWVACDTLLAIKAARRCRKRVEDAAAPMDCDAS

SEQ ID NO: 841 - protein, 1207 aa, Sorghum bicolor
MGSLRGAAAPSPAPRAGDLVTTQVSLGGFDATVKALDLADFLELKAGLVWRCRVKTSWTPPDAYPDFLLPTVTSAAAQPPQYDRVPPHAFVHFARPEGARAAADAAGRSELILSGKPLRAASAQESSLRASRRRSVSPFRFPGSRLEVGDLPAKDAFLAAWRGPASGLEFSVDPFDGSCRLIFARDTAFKVREFRESVVMRCDVKLEFPVRDVAEVRVFRLDCSLLIRLSAAPLVYYRTADDDIHESVPFDLLDDDDPWIRTTDITPSGAIGRCGAYRITFSPRFWPKMERALAYMRDRRVPIVDCGGGWGARRGLTVRDEPEFGERMQDLFFCVQHSEGLKFPVLFLVNALVHKGVINQHHLTPEFFGLLQRKEDDVNVAALREFWGDKFPVFDACGRLKNLQDRVARYPKLLRNKIGDDNSEVRRLVVTPTKAYCLPPEVERSNRVIRHYREVTDRFLRVTFMDEGMQLLNSNVLNFSAAQIVKDLMSNSFLHKTTVYKRIKTFLTEGFHMCGRKYSFLAFSSNQLRDRSAWFFAEDRMRTVETIRKWMGRFTSKNVAKHAARMGQCFSSTYATVVMQPHEVNECLEEVERNGYIFSDGIGKITCDLALEVAQKLRLTDNPPSAYQIRYAGFKGVIAVWEGENDGIRLSLRPSMHKFESNHNVLEVVSWTKFQPGFLNRQIITLLSSLNVPDAIFSQMQEAMLSNLNNILSDTDVAFDIVTTSCAEQGNTAALMLSAGISPGTEPHLKAMLLAIRSSQLLGLLEKTRIFVPKGRWLMGCLDELGILEQGQCFIRASSPSLNNCLVKHGPRFSSANKNAETIVGTIVMAKNPCLHPGDVRILEAVDVPELHHLVDCLVFPKKGERPHANEASGSDLDGDLYFVTWDENLIPPGKKSWNPMDYSPTEAKQLPRAVSPHDIVDFFLKNMVNEKLGPISNAHVVHADMSEYGAMDEKCIQLAELAATAVDFPKTGKIVSMPPSLRPKLYPDFMGKEDAISYKSEKILGRLYRSIQEASSGDLVPEETCTLNDLPYDADMEVPGATDFLSSAWECKCSYETQLNALLNQYGVRTEAELVTEHIWSLPKYSSRKQGDIKERLKNAYSALHKDFRSIFESFVTDQTEISDDEKIRFYEMKASAWYQVTYHPKWVQKSREMLKPDFEDMPARLSFAWIGVEHLARIKIRCHGEVKVDSRRPVERLAAYISGSM

SEQ ID NO: 842 - protein, 1220 aa, Sorghum bicolor
MVVSPAEPVTTRVSVGGFDSRFTSPRELADYLEAVAGRVWRCRVKTSCTPPNSYPDFQCLPLLPAANAHQPPPHYSSRARRRRAPDGEDDGALAFQAAPTPYNLVPPHAFVHFVHPEAARRAARSGILVRASSSSQNKSSAAVRDRAVRRQNAKPFRFTNARVEVGNLWAPDAFVVSWRCPGNSGSSASSGLDFVVDPLDGSCRLLFSRDTAFAFPASREAAVVLRCDFKVEFFVDDIAELLVFPTDDSLLLRLSAAPLLYYRTAADGVHQSVPFDLLDDDDDDPWIRTTDITASGAIGRCWMYRISFKTWFWPKMKDALAYMKEKRVPAVVCDIGSPGFRVHDEPEFGKPMQDLFLCVQHVEELQFSVLFLVNVLVHKGIVNEHQLTSKFFSLLKREEEQVNVAALTELLGENSQVFDVCWRLKNVQDWVAKNPKLIHPRSRGKVAGDYNAVVRRLVITPTRAYCMPPQVERSNRVIRHYHHVADRFLRVTFMDEGMQLLNNNALSFHAAPIVQSMMSKLFQHKTRIYRRVHTLMTKGFHLCGRKYSFLAFSSNQMKDRSAWFFAEEGTTTAATIREWMGQFPSRNVAKHAARMGLCFTSSYATVVTRPNEVNELLEDIERNGYNFSDGIGKITPDLAIEVAARLPLIDRYPPSAYQIRYAGFKGVIAVWPGQNDGIRLSLRPSMRKFESTHSVIEVVSWTKFQPAFLNRQIIILLMSLGVPEAIFWEMQEAMLKNLDRILSDREIAYKVVTNSCPERGTIARLMLSAGFSPATEPHLKAMLLAIKSSQLKGLLKKTKIFVPKGRWLMGCLDELGILEQGQCFIQASSLSINNHFMKHGSRFSSANKNAVTIVGTVVVAKNPCLHPGDVRVLEAVDVPELHHLVDCLVFPKKGERPHPNEASGSDLDGDVYFVTWDKNLVPPGKRSWKAMDYSPAEAKQLQRRVLQHDLIDFFLKNMASENIGRISNAHVVHADISEYGAMDEKCIQLAELAATAVDFPKTGKIVRMPPSLRPTKYPDFMEKDDAISYKSEKIIGKLYRTVRYYILGMPLESLIKDGMPAYDIDLEVPGASHFFLDAWQWKCAYESRLNALLNQYSGCTEAELVTGVIWSLADGRKRKKHEANEKFSHAYPELHQEFRRVFENIAADQDRMSDEKKNLVYEMKASAWYQVTYHPEWIRFSREKEPHGEERPARLSFPWIAIDYLACIKMRCRGQAKHFT

SEQ ID NO: 843 - protein, 1239 aa, Sorghum bicolor
MAAHNRSRSPESTRRRAHLHRSLKPSKPNQHHPRERCRQTAGHPLPGCNFAMVWPTGLATRAILTGFDAGLSARGLADDLEHVAGTVWRCRVKTSITPPKSYPDFHLPAILAAAVLHPDGPSRHGRVAPHAFVHFEQLKAANHAGDFFKMRISAQNTYLLHGRAACPRDGGTDMRRPMLFPDSCVEFGDIVPPDTFFVAWRGTDHSASAVDFIVDPSVGCCRLLFSRDTAFTFPDLCRRPTVVLCCDIKLEFSVSNVAEVLVFEADDSLILRLSAAPLVYYRTAGDDVQDRVPFHLIDTDDDPWIRTTDVTPSGAIGRCSAYRVSFGAMFWPTMRTALKYMERQGVPVDVRDSRWLGFTVLEEPDFGRPMQHVFFSLRQDEDLWFPELYLVNVLIHNRIVNLHQLTSEFFSLLRRAHEDVNVAALTELFGAKLQVCSNPCSRLKNAQDRATKNLNLLFHGSSRKLGDFNAEVRRLIITPTRTYCMPPQLERSNRVTRHYHQLSDRFLRVAFVDEGMLPLNANALSLQVVPLVKDLMSSPTQQMTTVYRRVQTILTEGFTMCGRKYSFLAFSTSQLKQKSAWFFAEDGTTTVASMKEWMGQFPIRNPAKHAARMGLCFTSSYATVTMQPCEVDEYLEDVIHNGYNFSDGIGMITQDLALEVAKRLQLTDIYAPSTYQIRYAGFKGVVAVSTGQNDGMRMSLRPSMRKFESAHSVLEVLSWTKFQPSFLNRQIITLLTSLGVPDAVFWQMQEAMLGNLKRILSDNNVAYEVVTNSCPEHGSTAGLMLSAGFAPATEPHLRAMLLAICASQMQGLLDKTRIFVPKGRWLMGCLDELGILEQGQCFIQVSTPSLNNCYVNRGSIFPSEYKNNAEIIVGTVVMAKNPCLHPGDVRILEAVDVPELHHLVDCLVFPQKGERPHANEASGSDLDGDIYFVTWDENLVPPGRQSGTPMDYFPAKTKQLPREVHQSDIIDFYLESMVNDNLGRICNAHVVHADRSDDGAMDPKCIQLAKLAAIAVDSAKTGEIVRMPPSLSPKEYPDFMGKGDAISYKSKKILGRLYRSILRENGDDFVSQGTCISNETPYDIDLEVPGALSFLEDAWQCKCLYEAQLNTLLSQYGLRSEAELVTGEIWPLVGYNKYQYQLKERINYAYSKLHQEFRSIFESIDISYCDNKNLAYEMKASAWYQVTYHPEFIRLREPDDEKTPARLSFAWIAVDYLAQIKKKCHGEMKVEEGRSAYIF

SEQ ID NO: 844 - protein, 1251 aa, Sorghum bicolor
MAAHSRRSRSRSPESARRRAHLHRSLKPSKPTQHHLHESRRLQTADRPPLGRNNFAAVAWPTEPATRVVLTGFDAGLSARGLADDLEHLAGTVWRCRVKTSVTPPESYPDFQLPVHPADDDDAAVFHHQDEPSRHGVVAPHAFVHFEHPNAADRAGHFFRKRVPAQSSYLLHGRAARPPRDGGTDDTRGRPMLFPDSHVEVGDVVAPGTFLVAWRGTDDDSASASALDFVVDPSAGCCRLLFARDTAFTFPDFHRRPAVLLCCDVKVEFSVADVAEVLAFEADDSLLLRLSAAPLVYYRTAGDDVHDRVPFHQIDVDDDPWIRTTDVTPSGAIGRCSAYRVSFAARFWPTMRAALEYMKKQGVPVDVCDSRCRGVTVLEEPDFGRPMLDVFFSLRHDEGLRFPELYLVNVLIHNGIVNPHQLTSEFFSLLRRAQEDVNVAALTELFGTKLHQVCNDPCSRLKNAQVRAAKNLNLLSNSSSRKFGDYNVFEVRRLIITPTRAYCMPPQVERSNRVTRHYRQVSDRFLRVTFVDEGMLPLNSHALSLHVVPFVKDSMSSSSQQMTTVYRRVQTILTEGFTMCGRKYSFLAFSTSQLKQKSAWFFAEDGTTTVASMKEWMGQFPIRNPAKHAARMGLCFTSSYATVTMQPCEVNEYLEDVIHNGYNFSDGIGIITQDLALEVAKRLPLTDIYAPSAYQIRYAGFKGVVAVSPRHNDGMRMMSLRPSMRKFESVHPVIEVVSWTKFQPAFLNRQIITLLTSLGVPDDVFWQMQEAMLGNLKRILSNTDVAYKIVTSSCPEHGSTAGLMLTAGFAPATEPHLRAMLLAICASQMKGLLDKTWIFVPKGRWLMGCLDELGILEQGQCFIRVSTPSLNNHYMNRGSISPSEYKNNAEIIVGTVVMAKNPCLHPGDVRILEAVDVPELHHLVDCLVFPKKGERPHSNEASGSDLDGDVYFVTWDENLVPPGRKSCTPMDYSPSKSKQLPREVHQQDTIDFYLESMVNDNLGRICNAHVAHADRSDDGAMDTKCVELAELAAIAVDSAKTGEIVKMPPSLSPKEYPDFMGKEDAISYKSKKILGRLYRSILMENSGDLLSQVTCISNENQYDTDLEVPGALSFLEDAWKCKCLYEAQLNTLLNQFGVHSEAELVTGEIWSLVGYNKKYQYQLKERLNYAYSKLHQEFRSIFESIDVSYGDSKNLAYEMKASAWYQVTYHPEFIRLRELDDEKTPARLSFAWIPVDYLAQIKKKVSWRNES

SEQ ID NO: 845 - protein, 590 aa, Sorghum bicolor
MSGSGDRRGGGPPGPDGGWKTKGKNSKKHGQVGGSQWTPGSSTNATPSTARPAWGGNGSSHPSGRTWAQASDRGAGNRCNPRPPPPTLRPVVTPPLANGWQWQSRPRPSGSEVEKDDASPSGSDPEVENVDGNNASDDDDDLSDDISDEYDSDASEKSFETLKTNKWFKKFFEKLNTLSVEQINEPAREWHCPACKNGPGAIDWYRGLQPLMTHARTKGSKRVRLHRELAALLGEELSRRGTSVVPAGEQFGKWKGLQESTDREIVWPPMVIVMNTLLEKDDDDKWKGMGNQELLDYFGEYAATKARHAYGPSGHRGMSVLIFESSAVGYMEAERLHRHFVNQGTDRNAWQLNKARFAPGGKRLLFGFLASKEDMEAFNKHCHGKSRMKYEMKSYNEMVVMQMKQMSEDNQQLNYLKNKVVKTEQHSKAVEESLGVVSQKLRETMEENIFIRSKAKEKHLEYEQEMKYQEEFFHSQIEDIHKATEDKEKLFEKLLQEERSKARRFDVDSGTTEDRKLRKEHVQKFIDCQVKDVEKFEAERDELIKVHDETKMRLKKEYMEKELELEKELDAALTGLMEKHKPDSFEASSS

SEQ ID NO: 846 - protein, 587 aa, Sorghum bicolor
MSGSGDRRGGGPPGSDGGWETMGRKSKKQGQVGGRQWASWNSTNATPNTARPAWGGNGSSHPSGTSWAQASDRGAPNRCNPRPPPQTVRPVVTPPLANGWQWQSRSRTSGSEVEKDDAPPSGSDPEVENVDGNNASDDEDDLSDDISDDYDSDASEKSFETRKTNKWFKGFFEVLNTLSVEQINEQTRQWHCPACKNGPGAIDWYKGLQPLMTHARTKGSTRVRLHRELAALLEEELSRRGTSVIPAGEQFGKWKGLRESTDREIVWPPMVIVMNTFLEKDDDDKWKGMGNQELLDYFGEYAATKARHAYGPSGHRGMSVLIFESSAVGYMEAERLHRHFVNQGKDRNAWQLNKVRFVPGGKRLLFGFLASKEDMEAFNRHCHGKSRLKYEMKSYNEMVVMQMKQMSEDNQQLNYLKNKVVKTEQRSKAVEETLGVITQKLRETMEENIFVRSKAKEKHLEYEQEMKYQEEFFHSQIEDIHKATEDKEKLFEKLLQEERSKARRFDVDSGTTEDRKLRKDHVQKFIDCQVKDVAEFEAERDELIKVHEEKKMKLKKEYMEKELELEKELDAALTVLMEKHKPDSFEA

SEQ ID NO: 847 - protein, 666 aa, Sorghum bicolor
METSPPPPPPPPPPPQIDHLLSQFPIIPKPDPDGPTPAQTPAPIAERSAALMLALTPELCQVLHRELAPSPDDDPYFARCLRQSQLHLEALAASLRPPSSSSSSSSAAAAAASLARVLPPPPPPQKELRTQLQREPGAGGGSNPSSSKKRARASTEVVRATHLSPADHLRYRALVRRARLTFEALRSTYQRQETSSGVRNRHDLRASRQMLSAGHWLHREVRIVGDIPGVFVGDAFYYRAEICVVGLHTMPQAGIGYIPGSLLNEGDPVATSIVSSGGYLDDEDTGDVLVYTGSGGRQRNRVDHHANQTLERGNLALHNSYLYGVEVRVIRGHDIDQGPHRKVYVYDGLYRVIESTFGPGKSGHDVCKFKLVRLPGQDDLASKTWHTAKLLKESMDARIRPPRYISLDLSKGAELLRVPVCNKVDNDRSPLLFEYIAQPEFPVRPAHVPVKQHGGCHCAGGCGSKCRCERKNGGEPVYTEDDILVMGRPVVYECGALCGCPMTCVNRVTQRGMKHRLEVFRSIETGWGVRALDLIQPGAFVCEYTGHVVVMDDQPGSALEGRSIIDPRRFPERWKEWGDASAVEPNMKRLQFAKFAGPGYVLDVSHKRNVACYISHSCTPNVFLQFVLRGNEDESFPHLMVFAMETIPPMRELSIDYGIDMELSAI

SEQ ID NO: 848 - protein, 1385 aa, Sorghum bicolor
MAEEDPLPPCDPQTQARWYQLEALERALAGNTLVFLETGAGKTLIAVLLLRRFANRIRSSPPPCFAVFLVPTVVLVSQQARVVRAHTDLTVAEFFGEMGVDFWNADKWRDMVDGAEVLVMTPQILLDNLRHSFFRLRDIPLLIFDECHHATGNSPYACIFKEFYHPQLNSRPSDPIPRIFGMTASLINSKDLARDKYSMKISELENLMNAKVYTVASESELLQYIPFATTRIIEYDDYIVKSELYSHTIRCLDKLEAKHLEILKGKLHGSYLENAEKRIKKLNAMFLYCISDLGVWLAAKAAEILQSNKESCVSFWGEKLDDEVEGFIRNYIGDVNNELSEIILKMTKRGLQRHIGEDFDADLQDGLLKSKVYFLIKSLLEYRHVQDLRCIVFVKRVITSIVLEALLSTINQMSGWSVRYMAGKNFGLQYQSRNTHVEIVDSFRSGKVHLIIATQILEEGLDVPSCNLIIRFDQAATNVDGGCLFDGVRDTSVFCFDGGDANALSKTEEFLESGQIMREESQRLESTFYQPLPNTLCNEEFYGVQSTGAIVTLNSSVQLIYFFCSKLPSDESVFFLRLDNVFFWFIQQNISWYFNPLPRFNIDKALGTCTLHLPMSSPVQTIYAEGEISIIKRVVCLNACRELHAVGALTDYLLPESSVPCEDEPDIVVDKYKEEQPDYFPEQLMDNWLSFCHRGLYYCYKISLEGCSETTTPAEIVLAVKCDLGSDFISTTFKLWGVQDYLSFTIRYVGVIHLNQEQVIVARRFQTRILSLLISKDLSEDGNSIKSLLEMQVSSGAVYLLLPVVSGKIDWCSIKFSSSEMHEDTIMDSRHSHSCKDTGLLQTKGGPFCPCMLQNSIVSTPHNGMLYAVSGLLLDLNANSPMRESVLSYKTHFKESHGLDLKCEDQPLLRASKLVKVRNILHERNYKKEKESTNVFELPPELCIVVMAPVSANTLRCFTFIPSIMYRIQCMLLSVNLKTQLGPSMKQFDIPALKVLEALTAKKCKEEFSQESLETLGDSFLKAWAFAAVVNCGILFLLWRSDQAKGYIRSETFNPETWIIPGVGNDSCGRSLRKLKSKRIADSVEALIGAYLSAAGEQAAYLFLKSLGMDIEFHKMPVERKITINAENFINLRSLELMLDYNFSDPSLLLEALTHGSYQIAGTTACYQRLEFLGDAVLDHIFTDYFYHQYPECTPELLTDLRSASVNNSCYAHAAVKAGLHKHILHSSSALHKKMADYLDKFEQSFSGPSHGWEAGICLPKVLGDVIESIAGAIYIDTKNDKKVVWRKMKRLLEPLATPDTLEIDPVKELHEFCDPKTCSIKYTVAREDRVTSVAVEVQTKGTTYKATRTGLTKRDAKKLAAKSVLKDMKAANSTQHFANGISCT

SEQ ID NO: 849 - protein, 698 aa, Sorghum bicolor
MEHFVELPPELCSLKITGFSKDMGSSLSLLPSLMCRLENLLVAIELKNVMSSYFPEASQISASGILEALTTERCLERISLERLEVLGDAFLKYVVGRHNFISYEGLDEGQLTRRRSDIVSNSNLYELSIRRNLQVYIRDQHFEPTQFFALGRPCKVVCNPDREATLHPKNIDPDRRENCNLRCTKSHHWLHRKTIADVVESLLGAFLVECGFKAAFAFLRWIGIKVDFENSALYRVLDASSTNLSLMNYMNISELEELIGYTFKHKGLLLQAFVHPSFNKHSGGCYQRMEFLGDAVLDYLMASYLYSAYPDLKPGQLTDLKSLALNNNSFAYVAVKKSIHKYLIKDSKSLTAAINKFQNYVNLSSSEKDLLEEPTCPKVLGDIVESCVGAVLLDSGFNLNHVWKLMLMLLKPILSFCGMHIDPMRELREICQYNGFELGLPKPTEDNGEFHVKVEVNIDGKMISCTAANRNSKDARKVAAQEALLKLKNNGYKHKRKSLEEILRATTKKESELIGYDEEPINVEDDIQMKNLLINGEMEGNIFFQNKEVSLNGRSETSIQSTTGDNKVDKNDANNGRNNKSNVVVQNGCLPRGATDKTNQREYHGDMVRKTARSFLYELCAANYWKPPDFELCKGEGPSHLRKFTCKVLIQITGTSATLLECYSDPKLQKKAAHEHAAEGALWYLKQLGYLPKDDYRV

SEQ ID NO: 850 - protein, 1067 aa, Sorghum bicolor
MAYRGGGRGGGRGGDRGDQRPPYGHGGAGGSGGGGGGRPFIWPPPPSTPRPVMPAPPPGPYPVPVPMGGYRGPMVMPHPGAYGVPMAVYRPSGQAAVFRAPAPAAPQVSFSPAPPAAPVTIRAPPPSSKTTSPAAPSSTTPAPPRQSARQSASTPASDSAPAASSAPSPAAALAKEVEKKLFVSETALAPPASAAHGTAAARADEASDLDLAPVSKKGLAHPARPGLATVGKKVMIRANHFLVNVADNNLFHYDEVDCRSVPFRKRLLPEHGIGKTIGQMRWKSCICLVAINPESKSRQTNREVLNELIKLHGKTALGGKLPAYDGRKSLYTAGSLPFESEEFVVTLVDPEKKDKESYVTVSRSFFSTTFGHRGDIGEGLECWRGYYQSLRPTQMGLSLNIDISATSFFKPVSVIKFVEEYLNMRDTSRPLSDRDRVKIKKALRGVRIETTHQQDQIRRYKITGVTSIPMSQLIFPVDDKGTRKTVVQYFWDKYNYSLKHGSWPCLQAGSDSRPVYLPMEVCKILEGQRYSKKLNDRQVTNILRATCKRPQEREQSIHDMVLHNKYADDRFAQEFGIKVSSDLVTVPARVLPPPLLKYHESGREKTCAPSVGQWNMINKKMINGGTIDNWTCLNFSRMRPDEVQRFCMDLIHMCNATGMVVNPRPFVDVKSAAPNHIENALRDVHRRATQMLAQQGVGNQLQLLIVILPDVSGSYGKIKRVCETDIGIVSQCCLPKHASRPNKQYLENVALKINVKVGGRNTVLERAFVRNGIPFVSEVPTIIFGADVTHPPPGEDSASSIAAVVASMDWPEITKYRGLVSAQPHRQEIIEDLFTVTKDLQKGHSVNGGMIRELLIAFRRKTNRRPERIIFYRDGVSEGQFSHVLLHEMDAIRKACASLEEGYLPPVTFVVVQKRHHTRLFPEVHGRRDMTDKSGNILPGTVVDQQICHPTEFDFYLCSHAGIQGTSRPTHYHVLYDENHFTADALQSLTNNLCYTYARCTRAVSVVPPAYYAHLAAFRARYYVEGESSDGGSTPGSSGQTVAREGPVEVRQLPKIKDNVKDVMFYC

SEQ ID NO: 851 - protein, 1036 aa, Sorghum bicolor
MASRGRGFGGGRQGPGGGRGSEGRGRGIGGGGGYQQPYGRGGDGGGESGGRGGVGRGRGVGGRGNGGGRGPGGRGGVGYQQPPPPPLGNVEVGGRGRGGVAVAVPVPARPAAPRPLAPVVAAPAVPAAASSSAPPAQAPRAPAGAAGGGAALAAGMGRLAVADNPAPPAPAAGRSEAQGPAHRPPPPPLSSKGITPPARPGFGTLGRKLIVRANHFAVQVADNDICHYDVLINPEPKARRTNRVILSELLKVHGATSLAHKIPAYDGSKSLYTAGELPFKSMEFVVKLGRREIEYKVTIRYAAQPNLYHLQQFLKGQQRDAPYDTIQALDVALRESPSLNYVTLSRSFFSKKFDNGVDIGGGLESWSGYYQSLRPTQMGLSLNIDICSTSFYQSIPVVKFVDDCLGLTNPAQPFSDRDRLKLKKALRGVRVETTHQQGKKSAYKITGITPVPLAQLSFSCNEGPQLTVVQYFAERYNYRLRYTAWPCLQSGNDSKPIYLPMEVCQIIEGQRYPRKLSDTQVTNILKATCKRPQEREGSIIQMVHRNNYSADKMAQVFGITVANQMANVQARVLPAPMLKYHESGREKTVAPSLGQWNMINKKMVNGGTVHSWTCLSFSRIQLHIVDRICEDLAQMCNSIGMDFNPRPVTEVQSASPNHIEAALRDVHMRAPNLQLLIVVLPDVSGHYGKIKRICETDLGIVSQCINPKKNKNKQYFENVALKINVKVGGRNTVLERAFVPNGIPFVSDVPTIIFGADVTHPTAGEDSSASIAAVVASMDWPQVTTYKALVSAQAHREEIIQNLFWTGTDPEKGTPVNGGMIRELLTSFFKRTGRKPKRIIFYRDGVSEGQFSHVLLHEMDAIRKACASMEDGYLPPVTFVVVQKRHHTRLFPEVHGRRDLTDKSGNILPGTVVDTSICHPSEFDFYLCSHAGIKGTSRPTHYHVLYDENRFSADALQFLTNNLCYTYARCTRAVSVVPPAYYAHLAAFRARYYDEQESTDGTSVVSGSAATAGGGPPAFRRLPQIKENVKEVMFFC

SEQ ID NO: 852 - protein, 975 aa, Sorghum bicolor
MAPPPPPPPPQAQARHHHHHHQGPANKGGGHAERTKQPLQSSVTQPKAEPPAVVAAAVLPEGGKRCGGGGGGRRRGGRGRAKAPPGESRAALAVAVAPAPAQAPPPRTVIGPPVPSKGLSFCRRPGFGTVGARCVVKANHFLAELPDKDLTQYDVKITPEVSSRTVNRAIMAELVRLYRASDLGMRLPAYDGRKNLYTAGTLPFDSREFVVRLTDEDDGTGVPPREREYRVAIKFAARADLHHLRQFIAGRQADAPQEALQVLDIVLRELANQRYVSIGRSFYSPDIRRPQRLGDGLQSWCGFYQSIRPTQMGLSLNIDMSSTAFIEPLPVIEFVAQILGKDVISRPLSDANRIKIKKALRGVKVEVTHRGNVRRKYRISGLTTQPTHELIFPIDEQMNMKSVVEYFKEMYGFTIQHPHLPCLQVGNQKKANYLPMEACKIVEGQRYTKRLNEKQITSLLKVTCQRPREQEMDILQTVHQNGYEQDPYAKEFGINISEKLTSVEARVLPAPWLKYHDTGKEKECLPQVGQWNMVNKKVINGCKVSHWACINFSRSVPENTARGFCQELAQMCQISGMEFNSEPVMPLYSARPDQVVKALKNVYNIALNKLKGKELELLLAILPDNNGPLYGDIKRICETDLGLITQCCLTKHVFKISKQYLANVSLKINVKMGGRNTVLLDAISWRIPLVSDIPTIIFGADVTHPETGEDSSPSIAAVVASQDWPEVTKYAGLVCAQAHRQELIQDLYKTWHDPQRGTVTGGMIRELLISFRKATGQKPLRIIFYRDGVSEGQFYQVLLYELDAIRKACASLEPNYQPPVTFVVVQKRHHTRLFANNHKDRSSMDKSGNILPGTVVDSKICHPTEFDFYLCSHAGIQGTSRPAHYHVLWDENNFTADEMQTLTNNLCYTYARCTRSVSVVPPAYYAHLAAFRARFYMEPEMSENQTSKSSNSTNGVSVKPLPAVKEKVKRVMFYC

SEQ ID NO: 853 - DNA, 3374 bp, Oryza sativa
  source 1..3374: mol_type = genomic DNA
agtcagtagtactcgagtatctccccattcctcctcgcgtaaaagaaaatctcccgtctcgtcgtctccgttccttgcgccatctcgcggctgaacaggggtcgcgagcagagcaggggatcctgctcatagaatggacgctcatgatggtgaggccgatgagttgccgccgcctcctcccgtacctgcaaatgtggtgcctattaaagctgatgacgttgagagcgaggtgccagcaaacaaaccagcaaaacctaagcggtttccaatggccaggcctggtttagggagaaaaggacagccaatccagctcttggcgaatcattacaaagtttctgtgaagagtagtgaagaatatttcttccactacaatgttattctgaagtatgaggatgatcgaccggttgatgggaaaggggtaggtcgaaaggtgattgataaactgcagcaaacctaccgttctgagctttcaagcaaggactttgcctatgatggtgaaaagagcctgtttacaattggtgctcttccacaagtaactaatgagttcacagtggtgttggaggatgtttcaactggaaagactgctgccaatggaagccctggaggtaatgacagccctggaggtagtgacaggaagagagttaggagaccataccagaccaagactttcaaagtggagctgtgctttgcagcaaagatccctatgaatgcaattgctcaggccataaaaggtcaagaatcagagaactcccaagaagctctcagagttcttgatataatattaaggcagcactctgctaaacagggctgccttttagtacgccagtcatttttccacaacaatcctaataactttgttgacctgggtggtggtgtgatgggctgtcgaggattccattcaagtttccgtggcacacagagtggactttctctgaatatcgatgtttcgacaactatgattgttaaacctggtcctgttatcgattttcttcttgccaaccagaaagttgatcaccctgacagaattgattggcaaaaggccaagcgtgctctcaagaacttgaggataagaaccacccctgtgaattcagaattcaagatcattggtttgagtgacagaaattgcaacgaacagatgttttcgttgaggcagaggaatgggaacaatggggatgttgatgaagttgaagttacagtctatgattactttgtgaaaaacaaaggcatagagctgcgctattctggcaatcttccttgcataaatgtggggaaaccaaagcgtccaacttattttccaatagagctatgctctcttattccactacaaagatacaccaaagctttgtcaacactgcaaaggtcctcccttgttgagaaatccagacagaagccccaggaaagaatgtcagtccttaatgatgcacttcgacatagtaattatgattctgatcccatgttgagggcatctggcatttcaattgcccaaaattttactcaagttgaaggaagggtcctgcaacccccaaagctgaaagctggcaatggtgaagatatattcccacgcaatggtcggtggaacttcaacaataagaaactgattcagacctgttctgtcgataagtgggcagtagttaatttctctgcacgctgtgatgtgcgaaatcttatccgggacctcataagaaatgcatctgcgaaggggattcaaatggccgaaccttttgatgtgtttgaagagagcccctcattgaggcgagcacctgtatcaagaagagtagatgatatgtttgaacagataaaatcgaaacttcctggagctccgaaattcctcttgtgccttcttcctgagaggaaaaattgtgaagtttatggtccttggaagaggaagtgtcttgctgaattcggtattgtcacacaatgccttgctccacaaagagtcaatgatcagtacctactcaatttgctattgaagataaatgccaagcttggtggaataaactcattgctgcaaattgaagcatccccttcaatacctcttgtatcgaagacacctaccatcatcttaggtatggatgtgtcacacggtcaaccaggacaatctgatagaccttccattgctgcggtggttagctctcgccaatggcctctcatctctaaatacagagcatcggtgcacactcagtcacctaagctagaaatgatgtcttccttgtttaagccacgaggaactgaagatgatggcctcattcgggaatcgctgattgacttctacactagttctggaaaacggaaaccggatcatgttatcgttttcagggatggagttagtgaaagccagtttactcaggtcattaacattgagcttgatcagatcattgaggcatgcaaatttctcgatgagaagtggtcaccaaagttcacagtgattgttgctcagaagaatcatcataccaaattttttcagtctggatctccagataatgttccgccaggtactgttgtggacaaacaagtgtgccatccaaggaattatgacttctacatgtgtgctcatgctggaatgattggaacgacgaggccaacacattatcatgttctgcacgatgagataggtttctcccctgatgatctgcaggagctagtgcactcactctcttatgtgtatcagagaagcacaacagccatatcagttgttgctccgatttgctatgcccatcttgctgctgctcaggtgggcacattcctcaagttcgaagatatgtcggacgcgtcgtccagccaaggaggtcatacgtctgtcggaagtgtaccggtgcctgagctgcctcgcctccatgagaaagtgaggagctccatgtttttctgctgatcgtgccgcctctcgatcaaatgctcgccgacgttgagaaatccggtgatcggcctgggggaactactagtacttttgcttctcataattaggaacatgtatggaacctatgtacctgcccttggcatgctgcctgtgtcatggattatctgctggtaggagtatcctttaaccaaacccttttagcttttaagttaggtttaatggactgctgtttagtatgtggtgtggtgttagtaagtttccagacttcgacattgtgcagctatgcctattgctggttatggtcccttcccttctatgtagcatgtgccgtttccctttgtctgagttgattttagaaatagtatctgatctgttcgaggttggggatgaatgaccaaggaaatctttccttgtggttatcatgacatcattgatatcctcaggattactcatcatcagtttactgacgggtaaaatataactggcatggatgaaattatgacgattttcttcccacaac

SEQ ID NO: 854 - DNA, 3540 bp, Oryza sativa
  source 1..3540: mol_type = genomic DNA
ggtgagcatccgcatcctctttctgattcatctctctctctcccaccgggactacttttttctggaatttgcttgcgttcgtcaatcctagcttctcttctaaatcttggaagaagctcttctcttcttttcagcgccataaccttaatacaagtaacaatctgtttgttccccaaaaagtttgagggtttaactgaacccctatgtctcaagttggatccgctcctgtaacgtttcccccttaaaaattttttttgggggttcaactaaaccctaggtttattggtatctgctcatagaatggacgctcatgatggtgaggccgatgagttgccgccgcctcctcccgtacctgcaaatgtggtgcctattaaagctgatgacgttgagagcgaggtgccagcaaacaaaccagcaaaacctaagcggtttccaatggccaggcctggtttagggagaaaaggacagccaatccagctcttggcgaatcattacaaagtttctgtgaagagtagtgaagaatatttcttccactacaatgttattctgaagtatgaggatgatcgaccggttgatgggaaaggggtaggtcgaaaggtgattgataaactgcagcaaacctaccgttctgagctttcaagcaaggactttgcctatgatggtgaaaagagcctgtttacaattggtgctcttccacaagtaactaatgagttcacagtggtgttggaggatgtttcaactggaaagactgctgccaatggaagccctggaggtaatgacagccctggaggtagtgacaggaagagagttaggagaccataccagaccaagactttcaaagtggagctgtgctttgcagcaaagatccctatgaatgcaattgctcaggccataaaaggtcaagaatcagagaactcccaagaagctctcagagttcttgatataatattaaggcagcactctgctaaacagggctgccttttagtacgccagtcatttttccacaacaatcctaataactttgttgacctgggtggtggtgtgatgggctgtcgaggattccattcaagtttccgtggcacacagagtggactttctctgaatatcgatgtttcgacaactatgattgttaaacctggtcctgttatcgattttcttcttgccaaccagaaagttgatcaccctgacagaattgattggcaaaaggccaagcgtgctctcaagaacttgaggataagaaccacccctgtgaattcagaattcaagatcattggtttgagtgacagaaattgcaacgaacagatgttttcgttgaggcagaggaatgggaacaatggggatgttgatgaagttgaagttacagtctatgattactttgtgaaaaacaaaggcatagagctgcgctattctggcaatcttccttgcataaatgtggggaaaccaaagcgtccaacttattttccaatagagctatgctctcttattccactacaaagatacaccaaagctttgtcaacactgcaaaggtcctcccttgttgagaaatccagacagaagccccaggaaagaatgtcagtccttaatgatgcacttcgacatagtaattatgattctgatcccatgttgagggcatctggcatttcaattgcccaaaattttactcaagttgaaggaagggtcctgcaacccccaaagctgaaagctggcaatggtgaagatatattcccacgcaatggtcggtggaacttcaacaataagaaactgattcagacctgttctgtcgataagtgggcagtagttaatttctctgcacgctgtgatgtgcgaaatcttatccgggacctcataagaaatgcatctgcgaaggggattcaaatggccgaaccttttgatgtgtttgaagagagcccctcattgaggcgagcacctgtatcaagaagagtagatgatatgtttgaacagataaaatcgaaacttcctggagctccgaaattcctcttgtgccttcttcctgagaggaaaaattgtgaagtttatggtccttggaagaggaagtgtcttgctgaattcggtattgtcacacaatgccttgctccacaaagagtcaatgatcagtacctactcaatttgctattgaagataaatgccaagcttggtggaataaactcattgctgcaaattgaagcatccccttcaatacctcttgtatcgaagacacctaccatcatcttaggtatggatgtgtcacacggtcaaccaggacaatctgatagaccttccattgctgcggtggttagctctcgccaatggcctctcatctctaaatacagagcatcggtgcacactcagtcacctaagctagaaatgatgtcttccttgtttaagccacgaggaactgaagatgatggcctcattcgggaatcgctgattgacttctacactagttctggaaaacggaaaccggatcatgttatcgttttcagggatggagttagtgaaagccagtttactcaggtcattaacattgagcttgatcagatcattgaggcatgcaaatttctcgatgagaagtggtcaccaaagttcacagtgattgttgctcagaagaatcatcataccaaattttttcagtctggatctccagataatgttccgccaggtactgttgtggacaaacaagtgtgccatccaaggaattatgacttctacatgtgtgctcatgctggaatgattggaacgacgaggccaacacattatcatgttctgcacgatgagataggtttctcccctgatgatctgcaggagctagtgcactcactctcttatgtgtatcagagaagcacaacagccatatcagttgttgctccgatttgctatgcccatcttgctgctgctcaggtgggcacattcctcaagttcgaagatatgtcggacgcgtcgtccagccaaggaggtcatacgtctgtcggaagtgtaccggtgcctgagctgcctcgcctccatgagaaagtgaggagctccatgtttttctgctgatcgtgccgcctctcgatcaaatgctcgccgacgttgagaaatccggtgatcggcctgggggaactactagtacttttgcttctcataattaggaacatgtatggaacctatgtacctgcccttggcatgctgcctgtgtcatggattatctgctggtaggagtatcctttaaccaaacccttttagcttttaagttaggtttaatggactgctgtttagtatgtggtgtggtgttagtaagtttccagacttcgacattgtgcagctatgcctattgctggttatggtcccttcccttctatgtagcatgtgccgtttccctttgtctgagttgattttagaaatagtatctgatctgttcgaggttggggatgaatgaccaaggaaatctttccttgtggttatcatgacatcattgatatcctcaggattactcatcatcagtttactgacgggtaaaatataactggcatggatgaaattatgacgattttcttcccacaa

SEQ ID NO: 855 - DNA, 3128 bp, Oryza sativa
  source 1..3128: mol_type = genomic DNA
aagagagagagagagagtgtgtgtggagaggcgaggcgttcgagtttcgagaggagggaggggggacaaggaggaggagcgcaccaccctctcggagaggtcgcctccgttcttgcatcgttttctttggatagggcagcgctttgacagctttggggagttagtcgagaagtgtgcacatggagtccaacagtggtgaaatcgaggagttgccacctcccccacctttgccaccaaatgctgagccaattaaaactgatgatacaaaaaagttatcaaaacctaagagggccttgatggctcgctctggttgtggcaaaaaagggcagccgatacagctgctgacgaaccacttcaaggtttcactgaaggcagcagacgaatttttccatcactactatgttaatctgaagtatgaggatgatagaccagtggatggaaagggcataggtagaaaggtgctggacaaactccagcagacctatgcgtctgagctggcaaataaagattttgcatacgatggtgagaagagcctgttcaccattggtgctcttcctcaagtgaacaatgagttcacggtagttctggaagacttcaacactggaaagtcatctgcaaatggtggcagccctggcaatgacagtccaggaaatgacaggaaaagggttagaaggccatatcagacaaaaacttttaaagttgagctgaactttgcagcaaaaattcctatgagcgccattgctcaggccttgagaggccaggaatctgaaaacacccaagaagcaattcgtgttattgatatcatattaagacagcattccgcaaaacagggttgccttttggttcgccaatcctttttccataacaatccttcaaattttgttgacttgggtggtggtgtgatgggctgtaggggattccattcaagcttccgagctacacagagtggactttcactcaatatcgatgtgtccacaacgatgattgtgaaacctggtcctgtggtagattttctacttgccaaccagaaggttgatcacccaaacaaaattgactgggcaaaggccaagcgtgctctgaagaatttaaggataaaaacaagtccagcaaatactgaatacaagattgttggtttgagtgagagaaactgctatgaacaaatgttcactttgaagcaaagaaatggtgatggtgaacctgaaggtgtggaagtatctgtttacgagtactttgtgaagaatcggggcatagagttgagatactctggtgattttccctgtatcaatgtggggaaaccaaaacggccaacttattttccaattgagctctgctctcttgtgcctttgcaaaggtataccaaggctttgagtacactacagaggtcttcgcttgttgagaagtccaggcagaaacctgaagaaaggatgtcagttttgtctgatgtgctgaaacgcagcaactatgattcagagcctatgttgaattcttgtggtatttcaattgctcgaggttttacacaagttgctggcagggtgctgcaggcccccaagctaaaagctggaaatggtgaagatctttttgcacgtaatgggcggtggaactttaataataagaggctcattaaggctagcagtatcgagaaatgggcagttgttaacttctctgcacggtgtaatattagggatcttgtccgagacatcatcaagtgtggtggcatgaaaggaattaaagtagaagatccatttgatgtcattgaggaggacccttcaatgcgacgagctcctgctgcaagaagggtagatggcatgattgacaagatgcaaaaaaagcttcctggacaaccaaagtttctgctctgtgttcttgctgagaggaagaattcagatatttatgggccctggaagcggaaatgtcttgctgaatttgggattattacacaatgtgtggcccctactagggtcaatgatcagtatattacaaatgtactgttaaagataaatgcaaagcttggtggcttgaactccctgcttcaaattgaaacatccccttccattcctcttgtatccaaggtcccgacaataatattgggaatggatgtttcccatggatcacctggacagtctgatataccttcaattgctgcggtcgttagttctcgtgaatggcctcttgtatcaaaatacagggcttcagtccgttctcagtcacctaagttagaaatgattgatggactatttaagccacaaggagctcaggaagatgatggcctcattcgggagttattagttgacttctataccagtactggtaaacgtaagcctgatcaagtcattatcttcagggatggggtcagtgagagccagtttacccaggtgctgaacattgagctggatcaaataattgaggcatgcaagtttcttgacgaaaactggtctccaaagtttacactgattgttgcacagaagaatcatcataccaaattttttgtgcctggatctcaaaataacgttcctcctggtactgttgtggacaacgcagtctgtcatccaaggaacaatgacttctacatgtgtgcgcacgctggaatgattggaactacaaggcctacacattatcatatccttcatgatgagataggcttctctgctgacgatcttcaggagttggtccactccctttcctatgtctaccagaggagcactacagccatatcagtcgttgcacccatttgctacgcgcatctcgctgctgctcaggtcagccagttcatcaagttcgacgagatgtcggagacgtcgtcgagccatggtggccatacctcggcgggcagcgctccggtgcccgagctgcctcgcctgcataacaaagtcaggagctccatgttcttctgctgagcagccgcttggctgctatgttatggcctgaacttgtggatgttttggtagtcttgtttatgtcgtgtttgtttaagtaccagctggggggtggatgttattaggctggatgccgcacttctgaacctgttaggataactactgaacctgtccatcttaatcgcagcttgttccatgctctgctttgctgcccttatgggttgggttgccttttttcttttcgattttttgctg

SEQ ID NO: 856 - DNA, 3096 bp, Oryza sativa
  source 1..3096: mol_type = genomic DNA
gaggcgaggcgttcgagtttcgagaggagggaggggggacaaggaggaggagcgcaccaccctctcggagaggtcgcctccgttcttgcatcgttttctttggatagggcagcgctttgacagctttggggagttagtcgtgtgcacatggagtccaacagtggtgaaatcgaggagttgccacctcccccacctttgccaccaaatgctgagccaattaaaactgatgatacaaaaaagttatcaaaacctaagagggccttgatggctcgctctggttgtggcaaaaaagggcagccgatacagctgctgacgaaccacttcaaggtttcactgaaggcagcagacgaatttttccatcactactatgttaatctgaagtatgaggatgatagaccagtggatggaaagggcataggtagaaaggtgctggacaaactccagcagacctatgcgtctgagctggcaaataaagattttgcatacgatggtgagaagagcctgttcaccattggtgctcttcctcaagtgaacaatgagttcacggtagttctggaagacttcaacactggaaagtcatctgcaaatggtggcagccctggcaatgacagtccaggaaatgacaggaaaagggttagaaggccatatcagacaaaaacttttaaagttgagctgaactttgcagcaaaaattcctatgagcgccattgctcaggccttgagaggccaggaatctgaaaacacccaagaagcaattcgtgttattgatatcatattaagacagcattccgcaaaacagggttgccttttggttcgccaatcctttttccataacaatccttcaaattttgttgacttgggtggtggtgtgatgggctgtaggggattccattcaagcttccgagctacacagagtggactttcactcaatatcgatgtgtccacaacgatgattgtgaaacctggtcctgtggtagattttctacttgccaaccagaaggttgatcacccaaacaaaattgactgggcaaaggccaagcgtgctctgaagaatttaaggataaaaacaagtccagcaaatactgaatacaagattgttggtttgagtgagagaaactgctatgaacaaatgttcactttgaagcaaagaaatggtgatggtgaacctgaaggtgtggaagtatctgtttacgagtactttgtgaagaatcggggcatagagttgagatactctggtgattttccctgtatcaatgtggggaaaccaaaacggccaacttattttccaattgagctctgctctcttgtgcctttgcaaaggtataccaaggctttgagtacactacagaggtcttcgcttgttgagaagtccaggcagaaacctgaagaaaggatgtcagttttgtctgatgtgctgaaacgcagcaactatgattcagagcctatgttgaattcttgtggtatttcaattgctcgaggttttacacaagttgctggcagggtgctgcaggcccccaagctaaaagctggaaatggtgaagatctttttgcacgtaatgggcggtggaactttaataataagaggctcattaaggctagcagtatcgagaaatgggcagttgttaacttctctgcacggtgtaatattagggatcttgtccgagacatcatcaagtgtggtggcatgaaaggaattaaagtagaagatccatttgatgtcattgaggaggacccttcaatgcgacgagctcctgctgcaagaagggtagatggcatgattgacaagatgcaaaaaaagcttcctggacaaccaaagtttctgctctgtgttcttgctgagaggaagaattcagatatttatgggccctggaagcggaaatgtcttgctgaatttgggattattacacaatgtgtggcccctactagggtcaatgatcagtatattacaaatgtactgttaaagataaatgcaaagcttggtggcttgaactccctgcttcaaattgaaacatccccttccattcctcttgtatccaaggtcccgacaataatattgggaatggatgtttcccatggatcacctggacagtctgatataccttcaattgctgcggtcgttagttctcgtgaatggcctcttgtatcaaaatacagggcttcagtccgttctcagtcacctaagttagaaatgattgatggactatttaagccacaaggagctcaggaagatgatggcctcattcgggagttattagttgacttctataccagtactggtaaacgtaagcctgatcaagtcattatcttcagggatggggtcagtgagagccagtttacccaggtgctgaacattgagctggatcaaataattgaggcatgcaagtttcttgacgaaaactggtctccaaagtttacactgattgttgcacagaagaatcatcataccaaattttttgtgcctggatctcaaaataacgttcctcctggtactgttgtggacaacgcagtctgtcatccaaggaacaatgacttctacatgtgtgcgcacgctggaatgattggaactacaaggcctacacattatcatatccttcatgatgagataggcttctctgctgacgatcttcaggagttggtccactccctttcctatgtctaccagaggagcactacagccatatcagtcgttgcacccatttgctacgcgcatctcgctgctgctcaggtcagccagttcatcaagttcgacgagatgtcggagacgtcgtcgagccatggtggccatacctcggcgggcagcgctccggtgcccgagctgcctcgcctgcataacaaagtcaggagctccatgttcttctgctgagcagccgcttggctgctatgttatggcctgaacttgtggatgttttggtagtcttgtttatgtcgtgtttgtttaagtaccagctggggggtggatgttattaggctggatgccgcacttctgaacctgttaggataactactgaacctgtccatcttaatcgcagcttgttccatgctctgctttgctgcccttatgggttgggttgccttttttcttttcgattttttgctg

SEQ ID NO: 857 - DNA, 3101 bp, Oryza sativa
  source 1..3101: mol_type = genomic DNA
gaggcgttcgagtttcgagaggagggaggggggacaaggaggaggagcgcaccaccctctcggagaggtcgcctccgttcttgcatcgttttctttggtaaggatagggcagcgctttgacagctttggggagttagtcgagaagtgtgcacatggagtccaacagtggtgaaatcgaggagttgccacctcccccacctttgccaccaaatgctgagccaattaaaactgatgatacaaaaaagttatcaaaacctaagagggccttgatggctcgctctggttgtggcaaaaaagggcagccgatacagctgctgacgaaccacttcaaggtttcactgaaggcagcagacgaatttttccatcactactatgttaatctgaagtatgaggatgatagaccagtggatggaaagggcataggtagaaaggtgctggacaaactccagcagacctatgcgtctgagctggcaaataaagattttgcatacgatggtgagaagagcctgttcaccattggtgctcttcctcaagtgaacaatgagttcacggtagttctggaagacttcaacactggaaagtcatctgcaaatggtggcagccctggcaatgacagtccaggaaatgacaggaaaagggttagaaggccatatcagacaaaaacttttaaagttgagctgaactttgcagcaaaaattcctatgagcgccattgctcaggccttgagaggccaggaatctgaaaacacccaagaagcaattcgtgttattgatatcatattaagacagcattccgcaaaacagggttgccttttggttcgccaatcctttttccataacaatccttcaaattttgttgacttgggtggtggtgtgatgggctgtaggggattccattcaagcttccgagctacacagagtggactttcactcaatatcgatgtgtccacaacgatgattgtgaaacctggtcctgtggtagattttctacttgccaaccagaaggttgatcacccaaacaaaattgactgggcaaaggccaagcgtgctctgaagaatttaaggataaaaacaagtccagcaaatactgaatacaagattgttggtttgagtgagagaaactgctatgaacaaatgttcactttgaagcaaagaaatggtgatggtgaacctgaaggtgtggaagtatctgtttacgagtactttgtgaagaatcggggcatagagttgagatactctggtgattttccctgtatcaatgtggggaaaccaaaacggccaacttattttccaattgagctctgctctcttgtgcctttgcaaaggtataccaaggctttgagtacactacagaggtcttcgcttgttgagaagtccaggcagaaacctgaagaaaggatgtcagttttgtctgatgtgctgaaacgcagcaactatgattcagagcctatgttgaattcttgtggtatttcaattgctcgaggttttacacaagttgctggcagggtgctgcaggcccccaagctaaaagctggaaatggtgaagatctttttgcacgtaatgggcggtggaactttaataataagaggctcattaaggctagcagtatcgagaaatgggcagttgttaacttctctgcacggtgtaatattagggatcttgtccgagacatcatcaagtgtggtggcatgaaaggaattaaagtagaagatccatttgatgtcattgaggaggacccttcaatgcgacgagctcctgctgcaagaagggtagatggcatgattgacaagatgcaaaaaaagcttcctggacaaccaaagtttctgctctgtgttcttgctgagaggaagaattcagatatttatgggccctggaagcggaaatgtcttgctgaatttgggattattacacaatgtgtggcccctactagggtcaatgatcagtatattacaaatgtactgttaaagataaatgcaaagcttggtggcttgaactccctgcttcaaattgaaacatccccttccattcctcttgtatccaaggtcccgacaataatattgggaatggatgtttcccatggatcacctggacagtctgatataccttcaattgctgcggtcgttagttctcgtgaatggcctcttgtatcaaaatacagggcttcagtccgttctcagtcacctaagttagaaatgattgatggactatttaagccacaaggagctcaggaagatgatggcctcattcgggagttattagttgacttctataccagtactggtaaacgtaagcctgatcaagtcattatcttcagggatggggtcagtgagagccagtttacccaggtgctgaacattgagctggatcaaataattgaggcatgcaagtttcttgacgaaaactggtctccaaagtttacactgattgttgcacagaagaatcatcataccaaattttttgtgcctggatctcaaaataacgttcctcctggtactgttgtggacaacgcagtctgtcatccaaggaacaatgacttctacatgtgtgcgcacgctggaatgattggaactacaaggcctacacattatcatatccttcatgatgagataggcttctctgctgacgatcttcaggagttggtccactccctttcctatgtctaccagaggagcactacagccatatcagtcgttgcacccatttgctacgcgcatctcgctgctgctcaggtcagccagttcatcaagttcgacgagatgtcggagacgtcgtcgagccatggtggccatacctcggcgggcagcgctccggtgcccgagctgcctcgcctgcataacaaagtcaggagctccatgttcttctgctgagcagccgcttggctgctatgttatggcctgaacttgtggatgttttggtagtcttgtttatgtcgtgtttgtttaagtaccagctggggggtggatgttattaggctggatgccgcacttctgaacctgttaggataactactgaacctgtccatcttaatcgcagcttgttccatgctctgctttgctgcccttatgggttgggttgccttttttcttttcgattttttgctg

SEQ ID NO: 858 - DNA, 3105 bp, Oryza sativa
  source 1..3105: mol_type = genomic DNA
gtgtgtggagaggcgaggcgttcgagtttcgagaggagggaggggggacaaggaggaggagcgcaccaccctctcggagaggtcgcctccgttcttgcatcgttttctttgggcagcgctttgacagctttggggagttagtcgagaagtgtgcacatggagtccaacagtggtgaaatcgaggagttgccacctcccccacctttgccaccaaatgctgagccaattaaaactgatgatacaaaaaagttatcaaaacctaagagggccttgatggctcgctctggttgtggcaaaaaagggcagccgatacagctgctgacgaaccacttcaaggtttcactgaaggcagcagacgaatttttccatcactactatgttaatctgaagtatgaggatgatagaccagtggatggaaagggcataggtagaaaggtgctggacaaactccagcagacctatgcgtctgagctggcaaataaagattttgcatacgatggtgagaagagcctgttcaccattggtgctcttcctcaagtgaacaatgagttcacggtagttctggaagacttcaacactggaaagtcatctgcaaatggtggcagccctggcaatgacagtccaggaaatgacaggaaaagggttagaaggccatatcagacaaaaacttttaaagttgagctgaactttgcagcaaaaattcctatgagcgccattgctcaggccttgagaggccaggaatctgaaaacacccaagaagcaattcgtgttattgatatcatattaagacagcattccgcaaaacagggttgccttttggttcgccaatcctttttccataacaatccttcaaattttgttgacttgggtggtggtgtgatgggctgtaggggattccattcaagcttccgagctacacagagtggactttcactcaatatcgatgtgtccacaacgatgattgtgaaacctggtcctgtggtagattttctacttgccaaccagaaggttgatcacccaaacaaaattgactgggcaaaggccaagcgtgctctgaagaatttaaggataaaaacaagtccagcaaatactgaatacaagattgttggtttgagtgagagaaactgctatgaacaaatgttcactttgaagcaaagaaatggtgatggtgaacctgaaggtgtggaagtatctgtttacgagtactttgtgaagaatcggggcatagagttgagatactctggtgattttccctgtatcaatgtggggaaaccaaaacggccaacttattttccaattgagctctgctctcttgtgcctttgcaaaggtataccaaggctttgagtacactacagaggtcttcgcttgttgagaagtccaggcagaaacctgaagaaaggatgtcagttttgtctgatgtgctgaaacgcagcaactatgattcagagcctatgttgaattcttgtggtatttcaattgctcgaggttttacacaagttgctggcagggtgctgcaggcccccaagctaaaagctggaaatggtgaagatctttttgcacgtaatgggcggtggaactttaataataagaggctcattaaggctagcagtatcgagaaatgggcagttgttaacttctctgcacggtgtaatattagggatcttgtccgagacatcatcaagtgtggtggcatgaaaggaattaaagtagaagatccatttgatgtcattgaggaggacccttcaatgcgacgagctcctgctgcaagaagggtagatggcatgattgacaagatgcaaaaaaagcttcctggacaaccaaagtttctgctctgtgttcttgctgagaggaagaattcagatatttatgggccctggaagcggaaatgtcttgctgaatttgggattattacacaatgtgtggcccctactagggtcaatgatcagtatattacaaatgtactgttaaagataaatgcaaagcttggtggcttgaactccctgcttcaaattgaaacatccccttccattcctcttgtatccaaggtcccgacaataatattgggaatggatgtttcccatggatcacctggacagtctgatataccttcaattgctgcggtcgttagttctcgtgaatggcctcttgtatcaaaatacagggcttcagtccgttctcagtcacctaagttagaaatgattgatggactatttaagccacaaggagctcaggaagatgatggcctcattcgggagttattagttgacttctataccagtactggtaaacgtaagcctgatcaagtcattatcttcagggatggggtcagtgagagccagtttacccaggtgctgaacattgagctggatcaaataattgaggcatgcaagtttcttgacgaaaactggtctccaaagtttacactgattgttgcacagaagaatcatcataccaaattttttgtgcctggatctcaaaataacgttcctcctggtactgttgtggacaacgcagtctgtcatccaaggaacaatgacttctacatgtgtgcgcacgctggaatgattggaactacaaggcctacacattatcatatccttcatgatgagataggcttctctgctgacgatcttcaggagttggtccactccctttcctatgtctaccagaggagcactacagccatatcagtcgttgcacccatttgctacgcgcatctcgctgctgctcaggtcagccagttcatcaagttcgacgagatgtcggagacgtcgtcgagccatggtggccatacctcggcgggcagcgctccggtgcccgagctgcctcgcctgcataacaaagtcaggagctccatgttcttctgctgagcagccgcttggctgctatgttatggcctgaacttgtggatgttttggtagtcttgtttatgtcgtgtttgtttaagtaccagctggggggtggatgttattaggctggatgccgcacttctgaacctgttaggataactactgaacctgtccatcttaatcgcagcttgttccatgctctgctttgctgcccttatgggttgggttgccttttttcttttcgattttttgctg

SEQ ID NO: 859 - DNA, 3008 bp, Oryza sativa
  source 1..3008: mol_type = genomic DNA
acttatttttttacttttcggtgaagcccgggaaaaagggcgctccatttcggagatttcgcacttcccaccccttcccttcgcttcctccctccctcgcctccgcctcatcgccgattcaaccgattcgccatcgccccccacctcgccgccgtcgccgccgccgcctcgtaaaccggtgggattttgcggggaggagggagtttggtgcgggagaagggggcggaggagtgggtggttttgttttttttttttttgtattttgtttttgtgtgtgagagaggggggaagggggcaatggagatggacacatcgccatcgtcttcggcgccgtcgtcgccggcggcgtcgtcggactccatcgacctcaacttcctgccgttcctcaagagggagcccaagtcggagccggcttcaccggagcgagggcctctgccgctgccggcagcggcaccgccgcctccacctccgccgccgcccccaccaccgccaccgcaggtgcaggcggcgacggtggcaactccggtgccggcgacgcccgacctctcggcggcggcggtgatgacgccgctgcagtcgctgccgccgaaccccgaggaggagacgctcctggcggagtactaccggctcgcgacgctatacctgtcgtcggcgggggcggccggcgtaatcgtgccggcggcggcgccggaggcctccgcgggggcggtggcgcagcccgggtcggggtccggcgcgaagaagcggcggccgcggtcgtcggagctggtgcgggtgtcctcgctgagcgtgcaggaccagatctacttccgggacctggtgcgccgggcgcgcatcacgttcgagtctctccgcgggatcctgctgcgggacgacgagcgcgcggaggtgctcggcctcacgggcgtccccgggttcggcgccgtcgaccgccgccgcgtccgcgccgacctgcgtgccgcggcgctgatgggggaccgagacctgtggctcaaccgcgaccgccgaatcgtggggccgatcccggggatctcggttggggacgccttcttcttccgcatggagctttgcgtgctagggctacacggccaggtgcaggctgggatcgactttgtcacggctgggcagtcttcctcaggggagcccatagccacatctatcatcgtgtccggtgggtatgaagacgatgacgatcgcggcgatgtacttgtgtacacaggacatggtggtcgtgaccccaacctccacaagcattgtgttgatcagaagcttgagggtggcaaccttgccctcgagcgtagcatggcctatggtattgagatccgcgtgatccgtgctgtcaagtccaagcgcagccccgtcggcaaggtatacttctatgatggcctctataaggttgttgactactggcttgaccgtgggaagtctggcttcggtgtttacaagtacaaaatgctgcgcatcgaggggcaggagtcgatgggctctgtaaattttcgactagccgaacagcttaaggtcaatgccctgactttccggccaacagggtatttgggctttgatatttccatgggtcgagagatcatgccggttgcactgtacaatgatgttgatgatgatcgtgacccacttttatttgagtatctggcgcggccaatatttccgtcctctgcagtccaagggaagtttgctgagggtggtggcgggtgtgagtgcactgagaattgctcaattggatgttactgtgcacagaggaatggcggtgagtttgcatatgacaagctcggtgctcttttacggggcaaaccactggtatatgagtgtgggccatattgccggtgcccacctagttgccccaacagggttagtcagaaggggcttaggaatcggcttgaggtattccggtcaagggagactgggtggggtgttcggtctttggatctcattaaggctggaaccttcatctgtgagtttagtgggatagtgctcactcatcaacagtcagagattatggctgcgaatggtgattgcttggtgcggccaagcaggttccctccaaggtggttagattggggtgatgtctctgatgtctatccagagtatgtggcaccaaacaatccagctgttcctgacttgaaattttcaattgatgtgtcaagggcaaggaatgtggcttgttatttcagccatagttgcagtccaaatgtgtttgtccagtttgtgctgtttgaccattacaacgcagcttatcctcacctcatgatctttgccatggagaacattccaccattgagggagctaagcattgactatggaatgattgatgaatgggtgggaaagttaaccatgtagtcaggctgtctactagaaggcaatactcagtttatcttcctttgttttgatgctttcataatccttctcatggagatttttgaggtgattgctgacaacaagtttctctgatggcgaataacagaagcttgcatatgggatgatgtttcaagccttcccatgaggaaggcaaagtcacagctcattgtcatccactaggcatcaaccgtccgttgtatatttttgcatggtagctgcagtgccccgtggctgattccctctcacccttgaagcttgatgcttgcttttgtaggaagcttgttttgcgcagcaagcaccgagtttcatacttgacctctgtttttctttttttttcccttcaattgctacgagaactccatatgtacatatatctgtacattacatgacttcaaaatgtgtcccacttctgtctgtaaatgctggttggccatgtcttgaatggtagggtagctcatagatttggagctcttacagaggctagtcctggagaggcattctgtccaggacatatatatgccgtactgatggttttgctagctattcatatattcaactgtcgggctactggtgtcaatgtcaccctggtatctacaagtgcaacctgttgaggtggtcattgtagagatttcatcagc

SEQ ID NO: 860 - DNA, 2181 bp, Oryza sativa
  source 1..2181: mol_type = genomic DNA
gtccgcttcggcttctctctctctctctctctctctcctcgaaaaccccaacacacacaacgcgaaccccactccgcgatggcgtccgccggcgatcgccgcggcggcggggggcctcccggctccggcgacgactccgggggtggttgggagactgttgagaagagggtaaagaaaccagcgcaacaagttgggaaggggcaatggggacaatggaattctccaaatgctgcacctgcacctactgcaccacggagtggctctggagcttttcatcattctggaaacactttggttcgacattctgatcgtaggccagcaagaggcactcctaggccaccaccacaaaacaggtctatagaggcagaactgcaagcaccgcacggagttgtgactgcacctctggcaaatggttggcagtggggagccaggtcttgcccacctggtactgaaagcaaggagggtggtcttcctttgtctggttgtgatcctgaaacagacaatgctgaaggttatgacacatcggacgatgataatgatgatgatatgagtgacgatttgagtgatgactatgattctgatgcaagtgagaaaagttttgagactcggaaaaatcacaagttgttcaaaggtttcttcgaagtcctggaggcgttaagtgtagaacagttaaatgaaccaactaggcaatggcattgcccagcatgcaaaaatggacctggtgcaattgactggtacaaagggctacaacctttgatgactcatgccaaaacaaagggttctataaaggtcaagcgtcacagagaattggctagtttattggaagaagagctatctcgcaggggaacttcagtggtaccatctggcgaacaatttaggaaatggaaaggattgcgggaaagcactgatcgtgagattgtttggccaccaatggtggttgttatgaacactgtattggaacaagatgaggatgataagtggaaaggtatggggaaccaagagctaattgattatttcagtgaatatgctgcaagcaaagcacgccatgcctatggtccaaatgggcaccgtggcatgagtgtgctaatctttgacagctcggctgtgggctatatggaagcagaacgtttgcatgatcactttgttcgtcaaagaacagacaggaatacatggaacagtgctcacaaggttacattcttacctggtgggaaaaggcagctgtatggtttcttagctacaaaagatgacatggagacattcaatagacattgccacggaaaatcccgtttgaaatatgagatgagatcttataatgagatggtggttacccaaatgaagcagatgagcgaagacaaccagcaactgaattacctgaagaacaaaatggttaagaaagagcagcactctaaattagtagaggatacattgagtgttgttacccagaaacttagggagacaatggaagagaatactattgtacgaaataaagccaaagaaaagcacttggagtatgagaaagagatgaagtaccaggaggaatttttccatgatcaaatcgaaaaaattcacaaggccacagaggagaaagaaatcaagtttgagaagttgctgcaagaggagcgagcaaaggctagacaaagtgatgttgactctggaagtactgaagatcgcaggcaaaggaaggaaaagattcagaacttcatagactgccaggtgaaggatgttgaggaatttgaagccgaacgagacaaactgatcaaattgcatgaagagaagaaggtgaagctcaagaaggagtacctggcgaaggaatttgagcttgagaaggagctggacacagccctcacttccctgatggataaacacaagccggacatcttcaaatcctccacctcgccttcgacatgaagaactgcggcttaccatacatttcctgctcatctacaatagctaagactcccatttcctaagtacccgtaaaacttctagcgatgcgaaagcatcattctgtttgggtggatgcatgcctttggaaggaaacctgaaccagttccgtattatatggagtactatcagtttatggttgctgatgaactgatgactgtgcgctgcgcttttacagcaagcgtggaaatcgaatatatatctagtttatctcatcattctgctctgcgttgcatc

SEQ ID NO: 861 - DNA, 2720 bp, Oryza sativa
  source 1..2720: mol_type = genomic DNA
gtttccacaccaccattggtcaagtcaagctgcgcgtccaatcccacaactcactgacgcgtgggcccgggtcgtcctcactactactactgtgcagtgcagccagcactagtgctctcctgctctcctctgcttctcttctcctctcctctcctcaccgggagagtggagaccctcgagatgcccggcggtcgccgcggcggcggcgggcgtcctggctccggcagcagcagcaacggcggaggctccgggtatagttgggttgagaagaagtcgaagaaatcggagaaatcagttggaaagggacaatgcgcaccatgtacttcttcaaatgctgcacctaaacctgctatggcgtggcaagcacggagtggcaatggatctttacaccctcctggaaatggtcgggttcaacattctgatcataggcctgctgccagaggcagtcctaggtcactgccacaaaataagcatacagaaacaaaattgcaagcaccgtgtccagttgtgactgcacctcttgcaaatggtttgcagtgggtacccaagtctcgctcatctggttctgagagcaatatggatgatgctcctacatcaggttctgaccctgaaatggacaatggtgcaacacacccagttgtgactgcaactcttgcaaatggcttgcagtgggtgcccaggtctcgctcatctgactctcaaagcaacaaggatgatgctcctacagctagttctgaccctgaaacggacaatgttgcaccacacccagttgtaagtgcacctgttgcaaatggcttgcagtgggtacccagatctcactcatctggctctgaaatggacaatggtgaggattatgattcatatgacgatgattctgatgatgatatggttgatgataccagtggtgactttgattctaaggcatctgagaaaaattttgagactcgaaaaaggcacaagctgttgaaaagcatttttgaacttctggagaagttaagtgttgaacagataaatgaaaagactaggcaatggcattgtccagcatgcaaaaatgtacgtggtggagttacctggtacaaagggttacagcctttgatgaatcatgctagaacaaagggttctaagagggttaagcttcacagagaattggctgcattactggaagaggagctgtatcgtacgggaatttcaatggcatcatctggcgagttctttggaatctggaaaggattgcgagaaaacactgatcgtcctatagtatggcccccagtggttattattatgaacactcgattggaacaagataaggatggcaagtggaaaggtatgggaaacaaagagctccttagttatttcagtaaatatcacgtgaaggaagcatgccatgcttatggcccagatgggcacagtggcatgagtgcgctaatatttgaaggatctgccgtggcctataaggaggcagaacggttgcataatcactttgttgatcaaagaacagacaagtatgcgtggttgaatcataggatcgtcatacctggtgggaaaaggcaactgtatggtttcttagctgaaaaagaagacctggaggcgttcaatagacatcatggaaaagactatttgaaatacgagatgaaatcttataacgagatggtggttacccaattgaagcagatgagtgaagacaaccaacaactgaattatgtgaagaatgagatggttaagacagagcgacattctaaagaagtagaagaagccttgggtgttgagacccagaaacttcagggagcaattgaagataatattattttgaagagaaaaaccaaggagatgctctcagagtgcgtggaacagatggagtttaatgcgaaattttatcatgaacaaattgaaagacttcgcaaggacaccgaggagaaagagaatgagtttgagaggttgctgcaggaggagctagcaagagctatagagtgtgatgttgactctgaaactacagaaaattgcaagctaagggaggaacagatacaaagaatcatagattgccaggtgaaggatgcggaggagtttgatgctgaacaagatgaattgatcaaaacacacgaagagaagaaggcgaacgtcaagatggagtatatggcaaaggatgttgagctcgaggaggagctttatgccgctctcacaagtctgatggagaaacacaagccggacatcttccaaccgtccagcccttgaagagctgcaggcttgcagctcaccatatatatgccctgctcacaataatctcaagaggtccctctcccaaatgaacttcaatttacatgccgataaattgcttgaaatgctcagaaactctcccgagtggcgtctctgggcaattgtgttgcacccccaatttggtgttttgatctgcaatttttatgcatctgcaaaggtcaatttgattgagttgacaagaatacctgttgctcaactcaaagatgatgtgctattcttgtcaaacatataactctacacggttttgatttcacttgcaagtttgtgaaaataaaagtaaaacagatggttttactttgcaagtaaaagaatttcggaactgccaagtccgtccctaatatttctagagattcagaaacatcacatgtttttgggttactgcaagcatggtttgaagtttggacttcattttggaatgaaaaatctgttcgattgtcatgtatggaagc

SEQ ID NO: 862 - DNA, 4046 bp, Oryza sativa
  source 1..4046: mol_type = genomic DNA
tcttcgttggtgtcccctcgcttaaacccctccgaaatttatttactcatcaaaaatttaataaccgaatccgattgatcttcccctctctctctctctctcactcctcccagctcccacccaaccacccaagccatgcgatcgccgcgcggcggggcggccgcgcagccgtcggggcggcgcggcgacacgacggcggcggcggcgggcgatctggtgacgacgcaggtcagccttggcggcttcgacgccggcgtcgccgcgggggacctcgccgacttcctggagcacgaggtcggcctggtctggcgctgccgcgtcaagacctcctggacgccgccggactcctacccggacttcgccctccccaccgcccccgcctccgcctcggccgcggccgcgccgccgcggtacgaccgggtgcccccgcacgcgtttgtccacttcgcgcgcccggagggggcgcgccgcgccgcggacctcgcgggggagaccaggctcatcctgagggggaagcccctgcgcgtcgcgtccgcgccggacagctcgctccgcgtgtcccgccgcagcagcatcgcgccgttccggttccccgacgtgcgcctcgaggtcggggcgctcccgtcgcccggcgcgttcctcgccgcctggcgcgggccggacgccgggctcgacctctccgtcgaccccttcgacgggtgctgccgcctcgtgttcacccgcgacaccgccttcacgttcccgggcttccgcgaggtcgccgccatacgctgcgacgtcaagctggagttccccgtgcgcgacgtcctggaggtccgcctgtaccgcctcgactgctcgctgctcctccgcctcgccgccgcgccgctggtgcactaccgcaccgccgacgacgacttccacgagccggtccccttcgacctgctcgacgacgacgacccgtggatacggaccacggacatcaccccgagcggcgccatcgggcggtgcggggtgtacaggatctccttctcggcgcgattctggcccaagatggaccgcgcgctggactacatgagggagaggagggtggcgatcgtcgattgcggcggcggatgggggccgcggcgggggctcacagtgcgcgacgagctggagttcggggagccaatgcaggacgtcttcttctgcctgcagcacgccgaggggctcaagttcccgctcctcttcatggtgaacgcgttggtgcacaagggaatcatcaaccagcaccagctcacgcctgaattcttcagcctgctggggagaagcgaggagaacgtcaatgtggctgcattgagggatttctggggggacaagttcccagtgtttgatgcgtgcgggaggctgaagaaggcactgaatcgggtggccaggaaccccaaacttctctgcagcaaggtcggggatgaccacgcggaggtgcggaggctggtgatcacgcccaccagggcttattgtctgcctccagaagtggagcgctcaaaccgtgttcttcggcattaccatgaggtggctgacaggtttttgagggtcacttttatggacgagggtatgcaggtgctgaacaacaatgtgctcaactccttcactgcaccaattgtcaaagacttgatgtcgaattttttccagcagaagacaacggtgtacaagcgtgtcaggatgttgttgacggagggtttccacatgtgtggaaggaagtactcatttctcgcattctcatcgaaccagttaagggacaagtcagcttggttctttgccgaggacagaaagacaacggtggaagcaattaggaagtggatgggacggttcacaagtaagaatgttgcgaagcatgctgctcgaatggggcagtgcttctcatccacatatgcaactgtgacaatgcggccggatgaggttgatgagagttttgatgatgttgtgcataatgagtacattttctccgatggaattggcaaaattaccccagatcttgcattggaagttgccgagaggctgcagctgacagataacccgccatctgcttatcagatcaggtttgctggcttcaagggtgtcatagctgtctggcaaggacatggtgatgggacacggcttttcctgaggccaagcatgaggaagtttgagtctaaccatttggtgttagaggtggtctcctggacaaagttccagccaggattcttaaatcgacagattataatattgctatcctcactgaatgtcccagattctatcttttggcaaatgcaagagaccatgctttctaacctcaacaatattctatcagacagagatgttgcttttgaggttttaacaacttcatgtgctgatgatggaaacactgcagcattgatgctcagtgctggctttgaacctagaactgaaccacacttgaaagcaatgctcttggctataaggtctgcacaattgcaggatcttttggaaaaagcaaggatatttgtgccaaagggaaggtggttgatgggctgtcttgatgagcttggggttcttgagcaagggcagtgctttattcgggcaacagttccatcattgaatagttattttgttaagcatgggtcaagattttcatcaacagataaaaacacagaggtcattttgggtactgtggtaatagcaaagaatccctgtcttcatccaggggatgtccgcatccttgaagcagttgatgtgcccgaactgcatcatctggttgattgtttggtgttcccccagaaaggtgagaggccacatgctaacgaggcatctgggagcgatcttgatggggatctctactttgtgacatgggatgagaaacttatacctccaggcaagaagagctggaaccctatggactactccccacctgaagcaaaacaacttccgcgccaagtatctcaacatgatatcattgatttcttcttaaagaacatgataagtgagaatcttggtaggatctgtaatgctcatgttgttcatgctgatcttagcgagtatggtgcaatggatgagaagtgtattcacttagctgagctagcagcaactgccgtggacttccccaagactggcaaacttgcgataatgccaccacaccttaaaccaaaagtctaccctgacttcatgggaaaggaagatggacaatcttataaatcagaaaagattcttggaaggctttatcgttcaatccaagaggcctccaatggtgatgtggtgtcacaagaggtttgcactccaaatgatctgccttatgacatagatctggaagttcctggtgcatcagatttcctcgcgagtgcttggcaatgcaagtgttcatacgacgcgcagctgagtgcgctgctcagtcagtacagggtccgcactgaagctgaacttgtgacagggcacataacgttccttgttaagaacagcagcaagaagcaaggcgacataaaggacaggctgaagactgcttactctgcactacgcaaggagttcaaaagtacctttgagagcatagcatcggatcaatgcgagattggtgatgacgagaagaatctgctgtacgagatgaaggcctctgcctggtaccaggtgacctatcaccccaaatgggtggagaagtcgaggggcattctgggcccagatggtgaggaaataccggcaagccttagctttgcatggatcccggtggattacttggcgcggataaagctaaggtgccatggtaaagtgagagttgaaggccaaaagcctgttgaaaggcttgcagcatacatctccgagaggatatgatgaaacaatgcaaaggtcgcagtaagaccactctgccattcgtaatgccggttcaaagggcatgcgtacaaaatatctgagtttttttttcttttcatttttgttcacttcactgaacttgatctcccgaatgtttcagtgtgcttttgttccttcttacatgcccctcaagcctgaaaaactgtacgtttcagttgagggctgtctatattatgaaatgcacaaatatacgctgcctgcagcttttggcaata

SEQ ID NO: 863 - DNA, 3931 bp, Oryza sativa
  source 1..3931: mol_type = genomic DNA
atgccgacggcggcggcggcggccacggcgtcgctgcgggtatccaacatcccgccatcggccgtcgccgcggagctgctcgccttcttcgactccgccgtcgccgtcgccggcggcgcgttcgcctgcgagatcgcggcggcccaccgcgggtggctcagccggggccacggcaccgtccagttcggctccgccgcggcggccgctgccgccgcgggcctcgcctcctccggccgcctcccccgcttcctcggcgccctcctctccgtctccccttcccccgtcgacctcctcccgcgcgcgtccgacctctccctccgcgcggccggcgcgggcctcgtggtgggcgaccgcgtcgccgagcgcgtgttcgaggccgccgacgcgtgggacggcgtgcgcgccgaggtcatcccggggaagcggcgggtggacctgtacctggagcacgattcccagaggtacaagctcgaggtgctcttcgaggacatgaaggattgcctcgggtgcaccctggacgggatgggcgccatcttgctgcagctcaattatgcaccaagaatacacactgcaatttctgggcctgcagttaattcaaggtttatggatgaccgctttcatgcatgcaaggaggatgctaaattttcctgggtcagggcacttgattttacacccaattattcttttgggaggtgctctactcttgtccttaaactgggtaaaagtgcattggtgtctgatattctcaaaagtttacctttctcaggaaatttaggggaattgactatgaattcaatggatggtgttggtgcctcctccaatgtggttccccttgttcattgtccgagggactattcagtgccttatgaagttctgtttcgtctgaactctctcatgcatatggggaagatagtcgccaagcatgttaatgccgatctgtttaaagcccttcaagaactaccggttgatgtctcaaggagaatttttgagaaaatgcacaaattagagtctacctgctacgggcctttacaatttatccaacaggaggcttatagcatgaagagaagccataatgttttgctctccaatgaaggtgaaggtgaaggtgaaagaaaattgatgaagtgttatagagttaacataactccctccaaaatattctgctttggacctgaagaagaggttacaaattatgtggttaagcatcattctgcatatgcttctgactttgtgagagttacttttgttgatgaagattggagtaagctttcttctaatgcaatctcagctagaattgaacaaggtttcttttctaagcctttcaaaactggtctatattatcggattctctccattctaaaaaaaggattttccattggtccaaagaactttgaatttttggccttctcagcaagtcaacttcggggaaattctgtttggatgtttgcttctaatgcttccttgaatgctggaggtataagaagatggatgggccactttgagaatatccgttcagtttctaaatgtgcagctagaatgggtcagctgttcagctcctccaggcaaacatttgaagtcttacgatgggatgtggaagtgattccagatattgagatcacaactgatggctccaaatacatattttctgatggtattgggaagatatctttgagatttgccaagcgagttgcacaccacgttggattagatcctactaaccttccttcagcttttcaaataaggtatggtggctacaaaggagtcattgccattgatcctatgtcctctattgatctttctctgcgtcctagtatgaagaaatttgagtctgagagcaggatgttgaacattacaagttggagcaagtctcagccatgctatgtgaatcgtgaaattatttctcttctctcaacattgggtataagggatgaaatttttgttgcaatgcaacaagatgagatgcgtgaaacagaagaaatgctaaccaacaaagaagttgctttgtcagtcctagggaaacttggtggttctgaaacaaagacagcagtgaagatgttgctgcaaggttatgagcctagttcagagccttacctgtcaatgattcttaaggcccatcaggagaataggcttactgacattagaactagatgtaaaatacatgttccaaaaggccgtgttcttattggttgtttggatgaaacaggtgtattagaatatggtcaggtttacattcgaattacaaagaacagcaaagaacaaaaggacagtaatcaatcatatttttataatgatgacgggaaaacagccacagttgttggaaaagttgcaatcacaaaaaatccgtgtctccatcctggtgatatccgagtacttgaagccatctatgaccctgatttggtgggcatggttgattgtcttgtcttccctcaaagaggagaaaggcctcatccaaacgaatgctcggggggagatttggacggcgacctctattttattacttgggatgacaaacttattccagagaaagttgatacacctatggactacacagcaacaaggccgcgcataatggatcatgttgttacactcgaggaaattcagaagcactttgttgattacatgataaatgactcgcttggtgccatctcaactgcccacttgattcacgcggaccgttcgccactgaaagctcggagtcccgagtgcctccagctggcaactctgcattccatggcagttgacttcgccaagacgggagctccagctgaaatgccgcgaacattgaggccgagggagtaccccgacttcatggaacggtgggagaagccgatgtacatctccaatggtgttcttggcaagctctaccgatcagcgatgggtcacatggagaaatcaggagattcaggagctctctcatcatcctcagcacaaccaagccccacatacgatcctgacctcgaggtccctggctctgacgaattcctgcaagctgcagaggagtactacgagctgtacgaggagaaactgaccacgctgatgaactactaccgtgcggagctcgaggacgagatcctgacgggcaacatccggaacaagatgctgtacctgaagagggacaacaagaggtacttcgagatgaaggaccggatcgtcgccgccgtcgacgccctgcacagggaggcgaggggctggctgctgagctccaggaaggaagaggacgcgtcgcggatggcgtcggcgtggtaccgcgtgacgtaccacccagaccgccgccgcgggaagcggttctggagcttcccgtggatcgcctgcgacaacctgctggcgatcaaggcgtcgagccagctcaggcggcggcggcagaaggacgatgactccaccgcggtggtgcagatggactgcagcgcctgatgtggcagaggattctctgactttgagtgactgacatgtgggcctgctggataagggatccatgggtcagtgacaagttagagggaaataaattagaggttctctgacgcgccgtcctaagtgaactttcaactgcacagttcattgctgtgcgcctgtgcctgtacgctgtacaaatctggttcgactaatcttagctgagctgaacagcagagctccggctcgcaacttggaagaggaaagagtttgatgatgaacacctacgtagagtaaaagttcctcttcctaataaaagagtcttagtgctgatctaccggtaaggtggaggcttccatttcttgttttctgcgaaggaaagaaacttagggtgtgtttagttcacacaaaaattgaaagtttaattgaaagtgaacgatgtaacgaaaaagttggaagttcatgtgtgtaggaaagttttaatgtgatgaaaaggttactccctccgtcccataacataagggattttgagtttttgtttgca

SEQ ID NO: 864 - DNA, 4047 bp, Oryza sativa
  source 1..4047: mol_type = genomic DNA
atgtgggatgagaaggaaaggccccgggtcttctgtctagcaccacaagatggagaagctgtctggtggttagcgatggaagatcctgaaattactggtcagcagtcaccaaatgccacaagtattgtgacggatctcatggatttggatgacattattgttgagggcaatgaggtacagtttgctatggatgtggatttgagagcaataccatctctgaaagatggagggcacacagacccactggtacaaatcccaggtgacatgtctcatatggatgtggatttgagagtgataccatctctgaaagatggagggcatgcagacccaccagtacaagtcccagttgacaagaggattgcaagcctagagaagctctgtaaagaagcatcaagatcatttttcagggaaactaggctagttagccatcagataaactcctacaatgattttgtctctcatgggctccaaaagatgtttgattctctcgatgaagttactgtcgagcctgactatgatccttcaaagaaagtaggcccctggaggcacgcgaccatcaagtttggtcgagtggagcttgaggagccggtgttttgggtcgacaactgtgatcttgatgtggaaacactcaaactgaagcctaaacatgctcgcctccagaagatgacatactcttcaaagatgaaagtagaaatgactgttcaggtctattcactccacaaaagcgacaaagctaaaactggcgaggacccatatatacaaagaaaagatataatgaaagagactaaatgggtcactattggcaagttacctgtcatggaaagcgaatgcgagtatgattttggtggatattttcttatcaagggaatggaaaaggtattcgttgctgaagagcagagatgcctctccaggatttggatcaatgacagccccacctgggaggcttgttaccaacggtctcaaatccgacgagaaaagatctctataaaacctgttcagtctaatgatggtttcagaaaagtcattaacctgtactttttgggtgcaactataccaatctggataatgttttttgcactaggtgtatcatcagacaaagaagcttttgatattattgacatacaagaatgtgatgcttccatggccaacataatatcagctactataactgaatctcatgagcagtgcgaaggctttcagagagaagggagagccagtgaatatattgataagttgatcaggaatacaaagtttccaccaaaaggatcctttgatgagtatattggtaggcatatgtttcctgatgttagtgggaataggagcaaagcactcttcttgggatacatggtgagatgtcttctattggcttcctctggcaatcggaagagtgataatagggatgatttccgcaacaagaggctggatttggcatgtgaattgctccagagagagctatgggtacatattatgcatgcccagaaacgtatggtcaaggtcatgcagagacatttgagtggtgatggtgacctacaacctcttgagtgttatgtccatgcatcaattgttaccaatggtctcaaccgtgccttctccactggttcctggtgccatccatttaataaaagagagaggtgttcagggattgttgcaacccttaggagaacaaatcctcttcaaatgatgtctgacatgaggaagacacgacaatgggttgcatatgctggaaaggctggagatgctagatatccgaatccatcatattggggaaagctatgtttcttgtccactcctgatggtgaaaagtgtggatttgtgaaaaatcttgccattactgctatcgttagttgtttggcaagggagccctcggttgacgcacttgtttcttgtgggatgaagaaactggatgaactgcttctacaagagatcagcgggaaagacagaatcttcttgaatggaaacttggttggagtttgtgcagactcagtcgagtttgttttgcacttaaggagcatgagacgcaggaagcaaattgatgcacaggtggagatcaaaagggacaagcaaaacaaagaagttcgtatattttccgatccaggaaggattctaagacctcttcttattgtcgaaaatctacgaaacatcatgaatcgaaagaatggatcatactccttccaggaacttatggatcaaaatataattgagctgattggtgttgaagaagaggaggatatccggtgtgcttatggaattaggcatctctttgcaggggacgaagaaaagaatttctcattctatactcattgtgaacttgacccttctttcttgctaggattgagttgcagtatcattccctttgccaaccatgatactgctaagagaattctaatgcaagctgaaaagatatcgcaacaggctattggctactccactacgaatcctctctttagagttgatacacattcccatcagctctattatccacagagacctctgttcaaaactgtagctgctgattgtcttggtaagagagactatacatctggaagcaaacatgactttgccagaccagagtatttcaatggccaaaatgcaatagtctcaatcagtgtccatcagggatttaaccaagaggattctttggtattgaatagggcctctttagagcgtggcatgtttcgaacacaacattttaagagctataaagcactgatagaaaacaaagagatcaccaaacgattaaaacacaaggaaaatatcaattttggaaaaactcctagcaagaaaggcctggttgacagtttagatattgatggcttaccatatattggagcaagtcttcagagtaatgacattatcattggaaaggtctcagactctggtgaagatcatagcatcaagctgctacatactgaaaaaggaatagtggagaaggttgttctttcagctactgatgatgggacaaattctgcgtttgttactctaagacagactcgctcgccacgcattggagacaagtttgccagcatgcatggccagaaaggagtcattggcttcttggattcccaggagaacttcccttttactcaccaaggcatagttcctgacattgtgatcaatccccatggctttccaactcgtcagactcccggccaacttcttgaagctgcactaggcaaaggaatcgccctcggcggtgccacccggtatgcgacaccgttcacaagtccatctgtggaagtgatcacagagcagctgcacaaggctgggttctccaggtggggaggggagagcgtgatcaacggccgcaccggcgagcgtgcggcgtcgccggtgttcaccggaccgacgttctaccagcggctccaccacatggccgaggacaaggtcaagttccggaacaccggcccggtgcacccgctgacgcggcagccggtggaggaccgccgccggtacggcggcgtcaagttcggcgagatggagcgcgactgcctcctcgcccacggcgccgccgccaacctccacgagcgcctcttcctcctcagcgacgtgtcgcgcctccacgtctgccgccgatgccagcgcgccgccgtcgtcgtgtcgcccgccgtcgccgccgacggcggcggcggccggaaggtgagggggccgtactgcaggttctgcaggtcggcggaggaggtggtgagggtgagcgtgccttatggcgccaagatcctctaccaggagctcttctccatgggcatctgcctcaagttcgacaccgagctcatctagagtagactctcagctttggacgggaaacatcatgatttattcttttaaaaatgggatttttatcattttttaagaacatttttaaggacattttagtctggtgaggagagttgacaatttactccattcattttatattataagacgctttggatttgtcgtaataagtctcttgaatgtcattaaaacctgtattgggatattatccaattggggcaattgtgttcttacccctactttcatatctaattgtgattttacccctcttttcta

SEQ ID NO: 865 - DNA, 4264 bp, Oryza sativa
  source 1..4264: mol_type = genomic DNA
gccagaacccttctcccccctcttcactctccccggaagcatcgctcgcacgcatcggacgccggaatccccgcctccggcgactagggtttcgccctccggcgacgcccctcctctccaccaggctattccctcgaagttatggaagagccatcaaaggacaatgggcaatcatcctgtgttgttgatcctgagctggaacctatgatgctggatgatgctagagagggagtatcccatacattggatgatgcaaatgggcattcttctatggatgttgacagaggatgccattctatggacaccacgagatcatctctgggtgatgatggtaaaggaaagcgcgactcatatgcccaaattccagtcgacatgagtattccaagcctagaaaagttctgcaaagaagcatcaaggtccttctttgatgagattggtctgatcagccatcagataaattcttataacgagtttgtctcacatgggctccaggaactttttgattctctgggggaagtgactgtggagcctagttatgatccttcaaatagaggaccaggtggctggagacatgctatcatcaagtttggaagagtgcaactagaagaaccagtattttggtctcatggatgtgatattgatgaacaatcgctcaaactgaagccaaggcatgctcgcctacagaatatgacatattcttccaaaatgaaagtggaagttcatttccaggtttactctatggagaagagtgacaaggctaaaacagggaatgataaatttggttacaagcgaaacattattaatgaaacatattatataaatattggccgccttccagttatggttatgtcaaatttatgttggctccacaaactcaaggaaagtgattgccaatttgattctggtggatactttttgatcaagggaatggagaaggtattcattgcgcaagagcaaaaatgtctgaccaggatttgggttgaggaccgtccttgctggatggtctctttcttgtctccaatcagaagaaggcgcatatatataaaactaattgattctgcaaataatgaagatgccagtggggggaagatcatttccatctcctttttgtatgcaaatatgccaatatggttgatgttttttgcactaggcatatcatcagataaggatatctttgatgttataaatatggaagactgtgatgcttgtgttatcaacacaattaccgcaactattaaagaatcagatgaattgtgtgaaggcttccgtaaatcagataaagcccggcagtatgttgacgaattgattaagaattcaaaatttcctcctgcagagccatttgatgattatattgctaaatacctcttccccagcataagtgggaaccggaacaaagcacttttcttaggttacatggtcaaatgccttttaatggctttcactgggaagcgcaaatgtgacaacaaggatgatttccggaacaagaggttggacctagctggtgaattgcttggaagagaactccgtgcgcatattaggcatgcagagagactcatggttaaggccttgcagagagatttaaatagtgagcgtgagttacaagaatttgatcattatctggatgcttcaattattaccaatggtctaaaccgtgccttctctactggttcttggtgccatccttacaaaagaaatgaaagatgcgcaggaattgttgcgacactaaggagaacaaatccgcttcagatgatctcggacttgaggaaaactcgccaacgagttgcttatgctgggaaagccggtgatgcaagatatccaaatccatcctactggggaaaattgtgttttatgtccactcctgatggtgaaaactgtggacttgtgaaaaatctagctgttacagctactgttagctccagagtagcaccgccattgattgacaggttcatttcttgtggaatgaataagctgcatgagattcctacagaggaggttcctagaatggataaaatcttcctgaatggggattgggtggggtcctgtagtgacccggcttcatttgtcttgcgtttaaggtgcatgagacgcagtggtctgatagatccacaggttgagataaaacgggacaagcaccaaagggaagttcgggtgttttctgatgcaggtcgaatcctcagaccgcttcttgtggttgaaaatctcaataaaattaggagaccgaagggcagttcatattcttttcagtggttaatgcaacaagaaataattgagtttattggcgttgaagaagaggaagatatacgaagtgcctggggcatcaggaacctatttgagagtgaagaagaggctcccatggtaaaaatgaataaagcagaggatgtcttcaatgttaagaggaagatcggaggggaggtttcaggttatacgcactgtgagctggatctttcttttctgctaggattaagttgtggtattatcccttttgcgaaccacaattttgctcggagggttctttaccaatctgaaaaacattcacagcaagctattggatactctacaacaaatccgcacatcagagttgataccctttcccatcaactttactatcctcagagaccccttttcaaaacagtgatagctgactgcattggtagatcagaatatacttttgggagaaaggatgactttgccagaccagagtatttcaatggccaaaatgcaatagtggcagtgaatgttcatcaggggtttaatcaagaagattccctggttatgaatagggcttctcttgagcggggtatgtttaggactgagcacttcaggaactataaggctgaagtagagaacaaaggtgggccaggtggcaacaaacgactaaaaatgaaggataagattgacttcggtaaaatgcaaagcaagagaggacgtgttgacaatcttgacgatgatggattaccatatgtcggtgcaagtcttcagagtggtgacattgtcattggaaaggtctcagaatctggtgaagatcatagtattaagctgaagcatactgaaaagggtatggtgcagagggtattactttcagctaatgatgaggggaagaactttgcagttgttactctaagacaggttcgatcaccttgccttggagataaattttccagcatgcatggccagaaaggtgtcgttggttttctagaatctcaggagaatttcccatttacttaccaaggaatagtaccagatattgtgataaatccacatgcatttcctacccgtcaaactccaggccagcttcttgaagctgctttggggaaaggaattgccctcggtggtacaatgagatatgctacaccattcacaacagcatcgtttgatgtgatcacagaccaattacacaaggctggattttcaagatggggagctgaaagtgttctcaatggccggactggtgaaaggatgcactcattgattttcatgggtcctactttttaccagaggctgatacacatggcagaagataaggtcaagttcaggaacacggggccagtgcaccccctaacacggcaacctgttgctgacaggaagaggtttgggggagtgaagtttggagaaatggagcgtgactgcctcctcgcccatggtgcagcagccaacctccatgagcggctcttcatgcttagtgacttctcgcagatgcacgtctgccagacgtgcgaacgtgtggcgaatgttatcatgaggcctgtcccaggaggaaagaagatccgggggccatactgtgggttctgccgctcttctgaaaacatagtaaggatcaatgtgccctacggcgcaaagctgctctatcaagagctattcagcatggggatctgccttagatttgagacggaagtctgctagaactccacatctactatcgactcaccatgtatatatatcctcgttgtcccttggagattctgttatgggcattagtgttgtagccacatgacttctcttccggttggacgatggcatagctaggaggggtgaatctgaagtcaggtgaaacctttcttttgctatttatttgggtgaagactcaattcccatcacctgcctttgatgtcctgtgaccaaccgatggcatagttagggatggggtgaatcagaggtcaactgaaaacccttttgctatagttcgatgtttcaccttggcactgtactatgcatatttggatgaaaactcatttcccatctcctgcttttgctgttctgtgatgaa

SEQ ID NO: 866 - DNA, 1500 bp, Oryza sativa
  source 1..1500: mol_type = genomic DNA
caaatgatatggagagtcaacggtctgatggagtcgaagaatctgaaaatggacctactgatgaagacaatggtgtgagcgatggtgaaaatgaggatgatttgggagctgatgcagaaaaatggaaacggcaagagatagatgagatggagtatgatgatgatgctgaaaaggaagagggttttgatatggatagtgaatctgaagaagataccaaatctaaacctgagagtgaagatcatcaagcaaaattagatgaagagttagaagagtctgaggaaggacatgtgctagattctagcaacaagggggaaaatttaaaagctaagcaagcaacagccagactcgaagatgaaatgaatgaagctgaggatgaaaaggcgcaagtgaccataaagttcaagaaaaacataaaatggactattcattatgaatcaacaggtttaaattttgaggttcactacgctttgcaagagcaacctcatattctgttagcccagattgctcagagaacagctaggtctgtttttgtcaaggcctgtaagaatattgatcgatgtgaagtgaataaaccaaagaagatagataataatacgataaatactcccatcactctacaaacagcaggggtgaactttgaagtattccataagttagtggactatctcgatatcaatgaggtcagatccaatgatatacacgctatgttgaacacatatggggtagaggctgcaagggcaaccatcattggggaagtgaagggcgtattcggtgcttatggtatccatgttgacatgaggcatctgaacttgattgcggatttcatgaccttcgacggcggttaccgaccgatgagcaggctagggatgggccagttcagcacctcgccatttggtaagatgacttttgagacggcaaccaagtttattgtggaagcagcttctcatggagagtctgacacactggacggcccttcggcaagcgtctgtctggggaaacctgttaaggtggggacgggttcctttggcttgctgcagaatttttccctggagcaacctgttgcgatgtaagcatacatgtagcatcatcagcctgtttgctttactggattagtccaattttgatggaggctgccatagagcagtaggaatgtgttacatatacggtactttttgctagcaagtgcagcaagttatgtcagttctcagttgtgtttgtgtagcaggaaacgaacatgtgaacactgatactccctttggtagtagtatggacattagtctctgtgtagactgtgtggagtatcaggctggcagcagcagtagcagcatgatcttggtttctttgccattttagatgcatttcagcacccttgttttttctgcctttaaacccaaatccgatagccactttgccgttgctgtctgcatgaggttaagatggcagctgagggggaatatatctaggactccagctgcaatatcttttctataattgagtgtg

SEQ ID NO: 867 - DNA, 2136 bp, Oryza sativa
  source 1..2136: mol_type = genomic DNA
atgatactgctgatggcatgtacagtgatcatgatcttgaaggtgaacctggggcccctgttggctcttgggctgcttgttccatttcagaagctgcctatggagctttggatcacccagttaacagtttagaggattcccctcttatgaacttgcaggaagttttgaagtgccacaagggcacaaattctctggatcatactggtttgcttttcctgtcaaagcatctaaggaaatatagatatggttttgagtatgcatcactagaagttaaggatcatctagaacgagtggacttttctgatatggttgacacggtcattattttatatggcggctcagatatgcagaaaacaaaaggaaatccttggatcactcattttcatttaaaccaggaaacaatgaagataaaaaggttaggactggaatttattgtaagagagattattgaccaatacaacaccttaagaaaacagttgaacaatgcgatcccttcagtttctatttcgaacagcaaatgttctgtaggcaatgagtgtgtcaagaatcagacctgttgcgtcactatggtagtacaggtggaaattaactccatgtcgcaattggacgttatcaaggaacgggtgattccaagcatcctggccacactgttgaaaggatttttggaatttaagaatgttaaggtgcaatgtcaagaggataatgaacttgttctgaaagtcggtatgtctgagcattgcaagagtgggaagttctgggctaccctacaaaatgcttgcatcccaataatggagttgattgattgggagcggagccgaccagagagagtatatgataatttctgctcatatggcatagactcagcatggaaattctttgtcgaatctttaagatccacaacagatgctattggaaggaatatccatcgacagcacttactggttgtggcagactgcctatctgtgagtgggcagttccatgggctaagcagtcaaggtttaaagcagcaaaggacttggttatcaatctcctctccattttctgaagcatgcttttctaggcctgcacacagttttataaatgctgcaaagcgagattcagtggacaatctttctggtactctagatgcaattgcctggggcaaagaaccttgtgcagggtcgtcaggtcctttcaagattctatattctgggaagtcacatgagacaaaacaaaatgagcacatatatgactttctacataaccctgaagttcaggctcttgaaaagaatgtaatggatacctacagaaaaaggactgaaaaaacttccaagcggagatcagcactcaattctgaaggcaatgctaccatcaatggtggtgccatatcttttaatcagaagtttcttaatgctaaagttggtatatgggagaacatcattgacatgcgcacttccttgcaaaacatgcttcgggagtacacattaaatgaagttgtcacagaacaagataaatcatgcttaatggaggccttgaaatttcatcccagagggtatgacaagattggtgtgggaataagagaaatcaagatcggagtgaatcctggtcacccgagctcaaggtgcttcattgtactaaggaatgatgatactactgcagacttctcttacaacaagtgtgtccttggtgctgcaaattctatctcacctgaacttggaagttatatagagaacagacgatctaatagagcagttcggccacatcagttgtagggtgagcccgtcaatgctttacgaacaagtatcagaagcaattttcatggataacgatagattggcgaatgttgcttcttggctgcttcggttaacggggatggcagggtcttacactctacagggatgtgtgtcaactcaactcaactcactcgagctacagatggccgacctgagccttagtgtaggtttcatgccttcacttctgtagcacatacatctatagtaacccttaagtttgtttggacaagaggtagtggcacaaagtgcaataggtgtcgtcgttatccttgcatcaattgtatgcggaaatgatccatattctaaatgagaatcacaaaattttggtcgttgaatttaatctagaatgtgatttattcgtgaa

SEQ ID NO: 868 - DNA, 5695 bp, Oryza sativa
  source 1..5695: mol_type = genomic DNA
atctagggtcccgcgccgccgccaactctcccccgttcctcccctttccgcgcgagcggcgagccggcgggcggcggctgtcggaggttcgcctcgcctcgcctcctctcccgcgccgccggcgagaaggcccgtaggtgcgttgtgtacggtttcctctccttctccacctcgccctagcctcctctctctctccctctccctcgccctaagcccctacaaaaccccagctccattccccattgctaccgtcacctctccctctccccttcctactctgcctcctccgccaggttttcacgatccgaagcggctccggctcgcgaacggcggcgtcgagcggagcccagtcgggaggggagatggcgcggccggaggagaagctgcggtgcacgaaggagcccttcatcgaggatgtcggcacgcggaggataaagagcatccggttcagcatgttctcggggaacgaggtgcgccaatccgcggaggtgcaggtttggaacagccggatctacaaccatgagatgaagccggtgcccaatggattgctcgacacgcggatgggtgcggcaaacaagcttggggagtgcagtacttgccatggttcatttgctgaatgcccgggtcattttggttacttgaagctcgcccttccagtttttaatgttggattctttaactgtattttggatgtattgaagtgcatctgcaagagctgcagcagggttcttcttatggagaaagatcggctagagtttttgaagaaaatgagaaatcccaaagcagatccgctacagaaaagtgctatcatgaaaaaagtgagggacaaatgcaaactatcccgttgcccctggtgtggattcataaatggtgttgctaaaaagggcagagcagggttgattattcttcatgattgtagcaaaacattggatggaagcacagaagagcttcgggacgcactatcacataagaaagagaaactatctattagtgctgttcgcatgctagaccctgcaattgttctatctcttttcaaaagaatgaccgatgaggattgtgagttgctaaacctcggtgataggcctgagaaacttattgtgacagagattgcagtgccacctgtacctatacgtccttctgttttcgtggctggtggaagaatgagcaatgaagatagcattaccgtcatattgaagagtattgctaatactaattccatccttaaggagaaccttcaaactggtggtcagttcatgaagtgctttgattgctggcaacaccttcaacttcaagttgttgaatatatcaacagtgacgcaccctctcttcccgagtcacaacatcgaggccttgttcagcgactcaaagggaagacaggccgatttcgtggtaacttgtctggaaaacgtaccgagtacactggaaggactgtcatttctcctgatccaaacttgagaataacagaggtggctattcccatcctgatggctcgagttttgacttatcctgaaagagtttcatactataacatagagaagctgcgtcagtgtatacggaatggtccacacaaacatccaggggcaaatttcatcatacaacctgatggaacaaagctgcacttaaagtattgcgatagaagaattgctgctcgagatttgaagtatggctgtgtagtcgaaaggcatttagaagatggagacattgtcctcttcaatagacaaccgagcttgcatagaatgtcaattatgtctcacagggctaggattatgccctggagaacactaaggtttaacgagtctgtctgtaacccatataatgctgattttgatggcgatgagatgaatttgcatgttcctcagactgaggaagcccgcactgaagcgcttatgctcatgggggttcagaacaatttatgtaccccaaagaatggggaaatactggttgcatccacgcaagactttttgacttcctcttttctggttacaagaaaagataacttttatgacaggtcgtcattttctctcttatgttcatatcttggtgatgcaatggaaaacattgatttgccaacacctgctctgattaagcctattgagctttggactggtaaacaactcttcagtgtgttagtacgtcctaacgcatgtacaaaggtgtttctgaatcttactgttaaagagaaaatttataagactcctaagggttcaactctggaacctgaagcaatgtgtcccaatgatggttttgtctacttccgaaacagtgaacttctatctgggcaagttgggaaggccactttaggtaatgggaataaggatggcatgttctccactcttgtaagagattataattctcatgctgcggcaagctgtatgaaccgcttggcaaaatttagtgcaagatttatagggaaccatggtttctcaattggtgtggacgatgtccaaccgggagaacatttaaaccaagagaagaaaatgaaaatagatggagggtacaaagattgccatgatcttattgcttcctattccaaaggtgcactccgtttgcagcccggttgcaacgcagcccaaacattggagcaaagtataactcgtgtactgaatgaaatcagagaagaagctggaaaagtctgtatgaatacacttcactggaggaacagcccattgatcatgtctcagtgtggatctaaaggttctccaatcaacattagtcagatggttgcatgtgttggccaacaatcagttggagggcgtcgtgccccgaatggcttcatagatcgaactcttccccactttcctataaattcaaagactcctgcagccaaaggctttgtcgctaattctttctatactggcttgactgccaccgaattcttcttccatacgatgggtgggcgagaaggtcttgttgatacagcggttaaaacagctgaaacaggatatatgtcccgcagattaatgaagggattggaagatctctcagttttctatgatcagacggtccgcaatgctagtggtggtattgtacagttcctctatggagatgatggcatggatcctgcaaagatggaagggaaagatggaaagcccttaaatttggatcaattgtttatgaaagtcatggccacttgtcctcaaaggggacagaatacattatctccaggtgaaatcttacaaattttaaatgacaagctctctgaacatgatgcctcctctgatgatggttgtagcgaaaagttcaagcaactgttaacgtattttcttgaggatcgtataaaattgctgaagagcacaaggagagcgcttctcctagatgaagatcatgttggagagaggcactccagctttgaagaatccattgctgctaatatttctggtatatctgtgaagcaactacaggttttcttggacacatgtttatctcgttaccacttgaagaaaattgaagccggagcatcaattggggcaattggggctcaaagtattggagagcctggaactcagatgacattgaaaactttccattttgcaggagtagctagcatgaatgttactcttggtgttcctcgcatcaaggaaattatcaatgctgctaaaaagataagcacacctattatcactgctgagttactttctgagaaggatgtgttgtctgcacgcattgtgaaaggctctatggaaaaggcagtgctgggtgaggtggctgaagccataaagattgtgttgaaatcaagtcaaccaaacttggttgttaaactcgatatgcaacgtatagaagccctgcacatgggcatctctgctgactctgtgcagctgtcaatattgaatcatccaaaaataaagctaaaatctgagcatgttcgtgttattgataaatccaagttgagaatttatccagctggaatagataagtccaaacttctatatgagttacatcatctcaaatccatgcttccaaaagtgatcgtgaagggtattccaactgttgaaagagctgtgatcagcgaaactggtgaagaaaatgacaaaagatacaagttgttggttgagggaacaaatctcttggcagtaatgggtactccaggagttgatgctatgaaaacaaaaagtaaccacatcatggaagtgaaccgaacactcggaattgaagctgcgaggagatctattattgatgaaattcagtatacaatgaaaagtcatgggatgaacattgattcgagacatatgatgcttctggcagatttgatgacatacaagggtgaaattcttggcattactagatatggtattgcaaaaatgaaaagtagtgtgctgatgctggcttcgtttgagaaaacagcggagcatctctttaatgcatcatacagtggtcgtgaggatcagatagagggagttagtgaatgcattatcatgggtatacccatgcaacttggcactggtattctcaaagtcagacaaaggcttgaccatttgcctgaatttaaatatcagcctgatccaatattggcgtgatacaagctagaagcctagaaccagcttaatttgtctgaagctggaattctgtacagatatatagaggggttggatgtataagcatgtataagcatcatatagcagggcagctacggcaactgtaatttgaggcaagtatgcactgctgaggtagcattggggcaaaactcccttttttctgatagtccaccgtatgtttcagcttattttggtttcaatcccccaggtttattctgtttccagagcaggattagtttaaagttcaaacatatactagctaggtgcagtgtgccacagtttgattagaattgggcccgctcattgaacttttctaaagaaggaaaaaatggtccctggtctaatgtcaaaagcttgagcagaacaaagtaaatatcacgtctctcttttggttcttccgtttctcctgtgtcttcagagcgagcgtagctgtcactccatagacaaccgcttatttttatttttttttctgatttcctcctagctctcacctgtcaacaacacatttgatctgctaatgctgctgctgccgtcatgcaccaacaagagaagatcgcctggaaagtaaggaaagagatcaaggagctcatctagaaggtatgttgatcgcttttgttaacttgttactctcactccacgggtcggtcggcgtgtcgtgtgagatcggtgctgcatcctcacctactctcccctccattcctccccgatctgtcaagatctcgcacgacttcgtcgtcgtttcttcctttgtctgaccgacggaatagcatatgcagaatgcaactgcatatgctctgcaaattgctgcgaatgtactacgctcctgaccgattcacatcagggaggaggaaacgagggttggtacgatggatgagagtccggaatatacattttctgattcttctttcgtcagacgccgacatacatgacccgtcagtaaaggaccctggttccttttgtttgacgtaatgacatgtcgccgaaattaagaggagaggatgaggaagaagccatcttgaaaagtgagaaccgatacgaaatgtgcgttttccggagggtaatttggaaccataccattataattttgtaaagtttaagatatgccatcggtatcttaatgacatgtagaacccacataagtcagttggatgcgtctttttccg

SEQ ID NO: 869 - DNA, 4713 bp, Oryza sativa
  source 1..4713: mol_type = genomic DNA
atggaaggtcatcctgatccaacatctgctgctactgccatgatccccgaggcctcgatcagacgcatcaacctgagtatcaccagcaacgaggaaattctgaaggcgcagccggtgaacgagctcgagaagccgatccccatcacgcatcaaagccagctgctgaacaatccatacttgggcctgcctctgcaagtcggcagctgtcagtcgtgtggcagcaacgccatcgaagaatgcgagggtcacttcagattcattgagctgcccatgcccatcttccacccgagccatgtcaccgagctgagccagatactcaacttaatatgcctgagatgcctcaagatcaagaacagaaagaagagcactcttaagggaagcaaattcacttcatgttcacactgtcaggagctcccaccgctgtgcgttgcagaagtcaagaagtccaatggtgcccgtggcttggagttgagagcacctatcaagaaagaactggaagagggattctggagcttccttgatcagtttggcagttgcacgaggggtacctctcattgtcgtcctttgctcccagaagaggtccaaaacatcataaagaagatccctgaagaaacaagaaggtggctttctgttaggggatatattcctcaggatggttttatactgagctatctctgcgtcccaccaaactgcctgagggtttccaatgttttggatggaaatacattcagctgttcaggcacatcgacaaacttattaaggaaagcactacgtaagatacagcagattcgtggttcaaggattggttcctcaaacatccaagtggatcaagttgcagatgatcttcaggtcgatgttgccaactacatcaacctcggaggaacaacaaagggtcacggagatgacacgttcacaagtcaaccaacagcaatgcaatggaagcaaaaaatgaagacattgttcatcagtaagagctcaagcttctcgtcccgtggtgtgattactggtgatccatacattggtctcaatgttgttggggtgcctgaggaagtagcaaagagaatgtcagtagaagaaaaagtcacagaccacaacattgctcaattgcaagacatgatgaataaaggactatgtttgacatatacagatgccaattccatcacgtactcattggatgcagggaaggacaatccgaacaagaaacacaccatactgaaggtcggcgaaattgtcaacagaagggttttcgacggggatattgtcttcctcaacaggccaccaagcactgataagcactcagttgaggccttctatgtccaagtccacaatgatcacaccataaagatcaacccactcatttgtgacccacttggagcagattttgatggtgactgtgtccaaatcttctacccaaggtcgctttcagcaagagctgaagctaaagagctatacactgtggataagcagctggtgagctcccataatgggaaactgaactttcagttcaagaatgatttctcactagctctgaagatcatgtgtggtagggagtattctgagagggaagcaaaccaaattacaaatgcaatgttctcatcagggatgtacccccagaagccactgattggtggaccttactggacctttcctcagattctagagaccactaaatctaatgcaataacactggcagaccatcttgacagagaatctgttggagccttagctactggtaccaccatctcatcgatcctttctacaaagggtccaagggaggccacagaatttctgaatcttctgcagcccttactaatggagtcactgcttattgattgcttcagcataaatttgggagatttcactgtcccaagtccaattctggaagctattcaaaataatccacttgagctaaataagtacagggaaccaattatggatttcataacccattcttctgccataggactgttggttgatcccaaaagtgattccaacatgaacaaagtagtggagcagcttggtttcctggggcctcaactacaacacaacggaagactatacagtagcaggttagtggaggattgcctgtctaagtctctgcacagatgttgcgggagtaccaattgttgcaaccctctagaggaatatggtactgtaaggagctcaatttaccatggactaaacccatatgaggctctacttcattctatatgtgaaagggagaagataatgcgtgcatctaaagggctagtggagcctggcagtcttttcaagaacatgatgtcaagactccgagatgtcacagcatgctatgatggatccataagaacttcgtctggtaacttagttcttcagtttggctcaagggatgcatcaaattgtgtgacaccaggtgaccccgttggtatcttggcagccactgcagttgcaaatgctgcttacaaggcagtgttggctcctaatcagaataatataatttcttgggactcgatgaaggaagtactgcttactagggcaagcactaaagctgatgccaatcaccgaaaggtcattttgtatctgaaccagtgctcttgtgaaaatgaatgcatggagagagcactcacaattcgagcctgcttaaggaggatcaaattagaggattgtaccacagagatatccatcaagtatcaacagcaagcaactcaagcagctcatcatcttgttggccatattcaccttgacaagaagcaattgaatcagattgaaacaattatggacagtgttcttcacaaatgccaggagacttttaggaataacataaagaagaagggatcgatgcgtgaaatattgaagacagtcactttcatttcaagcacaagtttgtgcgaccaacatacagatgatgataaaaaatttcaggtttcctgcttgcagtttttcctccctggaagcatcactaaaaatatatctgaatctactgaacgagttatcgatttcatgactaatgccattttccctataattttagacactgttataaaaggtgatcctcgagttgaggaagccaacctagtaaggattgaaccagaatcaacattttgggtccagagctctggtgcagaacagaaaggcgaggcggcactggaaatcactgtggaagaggctgcggctgctgagagtggcaatgcctggggagtagcaatgaatgcatgtatccctgtgatggatctgattgacaccaccaggtctatgccgtacgatatacagcaagtccgacaggtgtttggcatttcctccgcattcgaaaaagtcacacaggttcagttattcccctttctccttttagctgaaattcagtacctttccaagtctgttggaatgattacaaaatcagttctccaagagcacctgacaacagttgcaagtagcatgacctgcacaggcgatttgcatggcttcaacaactctggctacaaggccacatgtcaatctctgaaggttcaggcaccatttatggaggctacactatcaagatcaatacaatgctttgagaaggcagcagcgaaggcctactccgatcagctgggcaatgttgtatcagcctgctcttggggcaataatgcagaaattggaactggttcagcttttgaaatcctttggaatgacgagaacatgtcatcaagcaagagtatccttggtgggtatggtctgtatgacttcttggaagcagtagaaacaacaggagcaactaaagataaggcaattgttcctcataactactgcttatatgatgttgactgcattccagaggataaagtatgtttagaagaaaacaatcagatcacctggacagacaaaccaaaagctgaattcctgatggaatctgagggtaggagggcagggatgcacagcactggccaaaaacatccgaggaagccaaattggcatgaaggaaacaccaagagttccccaaattctactgcagtagaatttactggtcaggtgttccagagaaggcaactgaagaccaagagtaactggaactcagatgcaacacagcaagatgataaaccaagttggtatagttcaaatagcgcgggcacacagaacttcaccattgcaggatcatcccgaccaggtgaatggaacaggaagaataataatcgcggtcaaggtggtggtagagaagtgtggaaatcagagggaccacaccgtggaggcagtagcagtaataggaatcaaggtggtggtagagcagtgtggaaatcagaggcatcacaccgaggcagtggcaataataggaatcgaggtggtggtagagcagtgtggaaatcagaggcatcacgccgtggaggcagtatgaggcaggtagcgagttgtgcttttacaccagtggagcagcagatatttgaacaaatcgaaccaatcacaaagaatgtaaagaggatcatccgtgaatcgagggacggtattaaacttcctccagatgatgagaagtttattgtcacaaatgttctcatgtaccacccagagaggaagaagaagatagctggcaacggcaactacataacagtcgataggcatcaggtattccatggaagtaggtgcttatatgtcatgtcctcagatggatccagaaaagatttctcctacaagaagtgcctggagaactacatcagagctcagtacccagatgctgcagattcattctgcagaaagtacttcaaatga

SEQ ID NO: 870 - DNA, 6900 bp, Oryza sativa
  source 1..6900: mol_type = genomic DNA
gctctcgcactcgcactcgcgctcgtgtgggttcccttctcggcttctccgaggcgagggcttggctgcaggctaaaaccctctccgcccccaccccccgcgcggtggctagggttttagggcgagggtgggaggaggcaggcaggcgcgcgcgcgcgcgcgggtgttcagatagatggaggaggaccagtcagcaattccggttgctgaaggtgccatcaagagcatcaagcttagcctatccactgaggatgagattcgtacttattctataaatgactgtcctgtcactcatcctagtcagctcggaaatcccttccttgggttacctttggagacaggaaaatgcgagtcctgtggtgcctcagaaaatggaaaatgcgaagggcatttcgggtacattgagctgcctgtgcctatatatcacccttgccatgtaacggaactgaggcagatattaaatgtggtatgtttgaaatgcctccgcgtcaagaaaggaaaggtcaaacagacagagggaaaggataacacatcagcattgtcatgctactattgtcgggatcttccggcattatctttgaaagaaatcaaaacagcagatggtgcatttcgtttagagttgaaaatgcctcctaggaaattcatgacagaaggctcatggaacttccttgacaagtatggatttcaccatggtggaacctcccactgcaggaccttgctcccggaagaggctctcaatatattgaagaaaattcctgaagaaacgaagaggaaactagctgctcgtggttacattgctcaatctggatatgtgatgaaatacctccccgtgccaccaaattgtttatacattccagaatttacagatgggcagagcatcatgtcctatgacatatcaatatctctgctgaagaaggtgcttcagaaaatagagcagataaaaaagtcaagagctggatccccaaactttgaatcacatgaagttgaatcatgtgatctacagctctctattgcccagtacatacatctaaggggcactacaaggggtcctcaagacaacaccaagagatttgcaatcagtactgatccttctgcgttatcaacaaaacaatggctggagaagatgagaacattatttatcagcaaagggtcagggttttcatcacgcagtgtacttactggagatccatatattggagtagatgtgattggactgccttctgaagtggcaaaaagaatcactttcgaagagcaggtaacagacatcaaccttaacaggttgcaagagattgtggataagggattgtgtttgacctacagagatggccaggcaacctatgccatcaccgttggatccaaaggtcacactaccctgaaagtcggacagactatcagtaggagaattgttgatggggatgttgttttccttaaccgtccacccagtacccacaagcattccctccaggcatttcgcgtgtatgtccatgaagaccatacggtcaagatcaatccgctcatatgcgcaccttttgcagcggactttgacggtgattgtgtgcacatctattatccacagtcccttgctgcaaaagctgaagcactggagcttttcagtgtggagaagcagcttaccagttcgcacagtggcaaggtcaatctccagctagttagtgacagtttgcttgctctgaagcatatgtcttccagaacaatgttgagcaaagaagcagctaaccagctggcaatgcttgttacatgttctcttccagatcctgctgtgatcaagtcaaagccgtactggacaatctcgcaaatagtgcaaggtgctctgccaaaagccttaacttctcaaggggacaaacacgtagtcagggacagcactattataaaactggatcttgacaaagaatctgttcagacatcattctcagatttagtgtattccactctttctgttaagggtccaggagaagcactacaatttttgaatgtgctgcagccattattgatggaattgattcttttggatggctttagtgtaagcctccaggacttcaatgttcccaaggttctattggaagaagcacagaagaacattgaaaaacagtctcttatccttgaacaatcaagatttgcagaaaatcaggttgttgaaatgcgtgttgataataatttgaaggacatcaaacagcaaatttcagattttgttgtgaaacgctctcatcttggacttctgattgatccaaagagtgactcttcagtgtctaaagttgtccagcagcttggttttgtgggtttacaactttaccgtgaggggaagttctactcacgtcgtctggtggaggattgctactacacttttgtgaacaagcacccagctgtcagagaagaacattctccagaggcatatggtcttgtacggagttcatattttcatggccttaatccgtatgaggagctggtgcatgctatttcgacaagagaagctattgttcgctcctctagggggttgacggagcctggaacactatttaagaatctaatggcgttactgcgggatgtcgtcatatgctatgatgggacagtaagaaatgtctgcagcaagtctatcatacaacttaactacacggaggatgatgccttggacttccctagtgcaataggtcctggcgaaccagttggtgtcttggctgcgactgctatctccaaccctgcatacaaggctgtcttggatgcatctcagagtaacaatacttcatgggagcggatgaaggaaatacttcagacaacaagtcgctacaaaaacgatatgaaagaccgaaaagttatcctatttctgaatgattgctcttgtgccaagaagttttgcaaggaaaaggctgctattgcagttcagggctgcctaaggagaattacgttagaagattgtgctactgacatctgcattgaggatggaaactgggctgcacccgctgggtttcagcaccccgtaccacccccgcaatgcaagatattgcccgtccccatccccatccccgcacacgggtcagtcaagtttccccctgtccccatccctgcaccagaacaccttaaatataacattcacgttgtcaggtaccagaagcaaataggtttagatggaacttcagaagcagccccagcacttgttggccatattcatcttgacagggcacatttagaaaggatcaacattagcactgaagatattcttcagaaatgccaagaagtttctgggaaatatgggaagaagaaaggacatctcagtaacctgtttaaaaatattacattctctacttgcgattgtttattcacacagaagctggttgatggaaagctacctaagcttccgtgtttgcaattctttgtttctgataacatgatagtatctgaatcagtggagagagcagtcagtgtgttagctgattctctatgtggagtgcttttgaatacaatcataaaaggtgatcctcgaattcaagaggctaaaattgtttgggttggatcggatgcaacatcttgggttaaaaacacacagaaggcatcaaagggtgagccagcagtagaaattattgttgaagaagaggaagctttacatattggtgatgcctggagaacaacaatggatgcctgcataccggttctgaacctcattgatatacggagatcaatcccttatggtattcaacaagtgcgagaacttcttggcatctcatgtgcttttgatcaagttgtgcagcggctttcaacaactgtaaggatggtcgctaaagatgttctcaaagatcatctggtacttgtggcaaatagcatgacatttactggaaacctgaatggatttaacaatgctggttacaaggccaccttccgttccttaaaagttcaagtacctttcacagagtccacattgattacccctatgaaatgctttgagaaggctgcagagaaatgtcattcggattcattgggatgtgttgtttcatcatgttcttggggcaagcatgctgcaagtggtactggatcatcttttcagattctgtggaatgaaagtcagctgaaaagcaataaggagtatggtgatggcctgtatgattacttggcattggtgcgtactgacgaggaaaaggcaagatacacattctttgatgatgtggactaccttgcagaagagaacgaggcagatgtgtgcttatctcctgaattggatgggaccattggtcaaccgatcttcgatgataatttggaagagcaagatgttcagaataacagctcgtgggataatggcacaacaacaaatgcaagctgggaacagaatggtagtgctggaaatgattctgataaatggggaggttggaatgatgcagctgcaggagctgacacgggagtcacaaaaccagcaaaccaagggaattcgtgttgggatgtgcctgcgacagtggaaaagagttcctctgattggggaggctggggcactgaaaaggcgaaggagaaggagaaaatatctgaagagccagctcaacatgatgcttggtctgtccagggccctaaaagggcaacagatggaggagccagctggaagaagcagtctagcactcagaatgatgggaactcctggaaagagaacaagggaagaggatcaaatggaggttcctgggagaaagataatgcgcaaaagggatcatggggcaggggcaatgatgaagctgaaaataataatgatgtgcaaaacaaatcttgggagactgtggctgcagatgctcatgcttctacagagaagtcctggggcaatgttactgcatctccatcggataatgcatggagtgctgctccggtttcccaagggaatggaagttcagatacaaagcaatctgattcttgggatggctggaagtctgctggagttgacaaagcaattaacaaagacaaggaatccttgggcaatgtgcctgcatctccatcatttagtgcgtggaatgcttctccagtttcccaagggaatgaacgttcagatgcaaagcaatctgattcttgggatggctggaagtctgctggagttgacaaagcaattaacaaagacaaggaatccttgggcaatgtgcctgcatctccatcatttagtgcgtggaatgctgctccagtttcccaagggaatgaacgtttagatgcaaagcaatctgattcttgggatggctggaagtctgctggagttgatgattcagttaaagacaaggaatcctggggtaatgtgcctgcatccccatcagatagtgcgtggaatgctgctccagtttcccaagggaatgaaagttcagatgcaaagcaatctgattcttgggatggttggaagtctgctggagttgatgcttcaactaacaaagacaaggaatcctggggcaatgtgcctgcatctccatcagatagtgcatggaatgctgctccagtttcccaaggggatgatgtctggaattctgctgaagccaatgagtcacgtaataaggactggaaatcagatggatggggtgccagaggtggcaattggaggggccaaagaaacaatcctggtaggcccccaaggaaacctgatggcaggggtctgcctaggagacctgatgagagggggccaccaaggcgacactttgacctaacagctgaggaggaaaagattctaggagaaattgaacccactgtgctgagcatcagaaagattttccgtgaatcaattgatagcataaaactttctccggaagacgaaaaattcatcaaagagaatgttcttgaacaccaccctgagaaacaatcaaaggtgtctggtgaaatcgatcacataatggttgacaagcaccaagtgttccaggatagtcggtgcttgtttgtggtgtcttcagatggaactcggtcagatttctcctatttaaaatgcatggagaattttgtgaggaagacctaccctgagcatggggactcattctgcaagaagtatttcaagaggcgccgtgaccaaccaccagcagctgatggaggcacagcaccaggcactccagctggggctacacagtctactgcagttgatacccaggagggcacttcacagcagacccaaccagatatcgcaaccgctccagctgcaactcaacaagagactcttcaagacactccagctcctccagcagacgatggattgctcgggaagggacctagcccgtctgactgatgctcagggtgcgcttagagctgccaacatcctgcttgtgctctaatcctgccactctttttttcctacttggcctgacattgcctagtgactagacagatggtgactttgtgtagtagagaagggttagcagtctttaggtctcactcttccagacgaactctgtaaattctggatgttagtgagctgcatcccgtagcttaaactcgtttttaccctctcttttttttttatcttttttgtctttccagtatggttatttggttagtccaatgcaagccgattctgcgaggccgtgccgaatctgatgattttgttgttctgcaaggcacagagctctcgctggtgctgtttcattttggatgctgttacagggttttgtaaagacactgaaactaccatgcgaatcagcaaaagatggattccctgctgtgaacaagcaggtggccttgcatgaattcattcatcaaacatgaggtcttgctggtgacgccacaaatttggtttgatgtgtttgcactgagctggaccaatctgttcttgaaatttcttcaggttggtacagaaaataggtaatattgtattctgtcatttcattaccaagaccagtggtgtgaacaagctggaggcattgcttaaatgcatccgtcaaccgtatgattgtttcagca

SEQ ID NO: 871 - DNA, 1384 bp, Oryza sativa
  source 1..1384: mol_type = genomic DNA
cacttactaaatgggctattgaatatgaagaacctgctggggatgcatttggtgaaaaccatccagaagctgcagtatttgtcgaaaactgcaatgtgattctgaaggcaattatggacaagtgtggtgattctgatgattgcatctccacttctgaggctgctgaacgagcagctaaactttctgaggacaagattaagaatctgcccgtgcctggcgaagtagaattcataaatggtggccctccgtgtcagggtttttctgggatgaacagattcaatcaaagtccctggagcaaagtccagtgcgagatgatcttagcattcctgtcatttgcggagtatttccgtcctagattctttctcttagaaaatgttaggaactttgtctcgttcaacaaaggacagaccttcagattgacactggcatcactcctggagatgggataccaggtccgatttggaattttagaggcaggggcttatggtgttgcgcagtccaggaaaagggcattcatttgggccgctgcacctggagagactcttccagagtggcctgaaccaatgcacgtctttgctagccctgagctgaaaataactctacctgatggcaagttctacgccgctgtcaagagcaccgctgcaggagcccctttccgctcaattacagttcgagatacaattggggatctaccagctgtggaaaatggcgccggcaaaccaacaattcagtacggaagcggtcctgtgtcttggttccagaagaagattagaagcgacatggcttcactgaatgaccacatatctaaagagatgaatgagctgaacctcataagatgcaagcacattccaaagcgcccaggttgcgactggcatgacctgccagatgaaaaggtgaagctgtccacagggcagatggtggacttgatcccttggtgcttgcccaacacagccaaaaggcacaatcagtggaaaggactgtacggtaggttggactgggagggcaatttccccacttctgtaacggatcctcagccaatggggaaggtcggcatgtgcttccatcctgagcaggacaggatcattactgtccgtgaatgtgctcgatcccagggcttccccgatagctaccgtttcgctggcaacatccagaacaagcacaggcagatcgggaatgccgtgccaccgccccttgcctatgccctcgggaggaagctcaagcaagccatcgacgccaagcgttgagtggcttttaacttcactgcatcgccctcattttttggtcggtccaaataggtttaactaagcattacagttttctatattttgtgagcaattggactcctaaaattaattctgggatggttacatggattaccttttgt

SEQ ID NO: 872 - DNA, 2567 bp, Oryza sativa
  source 1..2567: mol_type = genomic DNA
accgtacacccccaaaacccccctgccttctctcgccgattccgccaccgccgccgcgccgcgcctcgccgccggccgcccttcgatctcctcctcctcctcggaatggatctctacatggacgactacatcgacccctacgaggaggccgaggcggaggccgccgcggaagccgccgggctgacgtccgcggcagcggcggaggactcctccgacgagggcgactccgaggacgactccgaggccgagagcgactacgaggagaggtcctacggcctcctccgctccggcaaccaccgcgtgcgcaacccggacggcaccttccgctgccccttctgccccggcaagaagaagcaggactacaagctcaaggacctcctccagcacgccgacggcattggcgcctccagcaagcgccgccgccacggccgcgagcgcgccttccaccgcgccttcgcccgattcgtccgcaccgacccttccttcgcccaagacctcgccgccatcaacgggatcgccaccactgctgatgctatctctaattctagtgctgccggtgccaaggagaaggcggatgccaatggcgacacagacggatccgcttcggtggcggctgtggccgcggggaatagacgggaggaggagaggtttgcttggccatggagtggggttcttgcagctggtgcagggttcaatgccgaggacttcgcggatagggtcgcaatgtttggtttggatgatgttgtgcctttagttgtcgatgatgcggaaggcgctgatagctttgcgattgtgaggttcgctaatggttggggtggattcggcgatgcgctcacgctcgagaaccatttcaacaagaataagcttgggaagaatgaatgggatgcaaggggtagtgctggagatgctgtgaagggagatgatggggacacagatgttaaggtttatggttgggttgcccgagaaggggactataatgccgggaatgtggtgggcaggtatttgaggaagcatacgaacctgacaaccatagatgaggtctccaagagtgaatcggaaaagtcggggaagatggtagcgatactggcaactcagatcgaggcgaaaaatcgattcttgcaggacttggagacaaaaaagaatgcaaccgaactctccattgcacggctcgaggaggacaacaggaagctacacgatgcatataatgaagaaatgcgcaatctacaccggagagctcgtgattatgctttaagagttttccaggataatgaaaacttgaagcttgaattagatagcaggaggagagaattgaattcacgtgctaagcagcttgaaaagataacagctgagaatgcaagcgacaggaaaaaacttgatgatcagaagcaaaaggcaaaggatgataatagtgaacttgagctagcaagcatagaacagcagagggctgatgaagatgtaatgaagctagttgaggatcagaagagggaaaaggaagatgtccttgcaagaatgcttcagctggaaaaagagctgcatgaaaaacaacagcttgagcttgaagtaacacggctgaatggtacacttcaagtgatgaagcatttggaaggagacgatgatggggatattcatgataagatggagaaattgagtgaaagattagaacatgaaaagaaacgtttggaagaattgagcggagagctggtgaagaaagaacgtgaaagcaacgatgagttacaagaggccagaaaagaactgataatgggtttggaggacatgctaactgggcgaactgctattgggataaaaaggatgggggaacttgatgagaaacctttccaaaatgcatgcaagagaaagtacggaaacgatgactatgagaccaaagctgcggagctggtctcaagttggcaggaggaaataaagaagccatcctggcatccttataagattataacggttgatggcgaagataaggaagttgtagatgatgacgacacgaagctgcggcacttgtggatcgagtacggtgacgatgtgtgcaatgcagtgaagaccgccctgagcgaggtcaatgagtacaatgccagtggacggtatgttgtgcccgagctgtggaacttcaggaaaggccgaaaggcgacaatgaaggaggtgctcaagtacatctttggacagatagagacaaccagcaagcgcaggaggccgtgaagttcgtccttcgatggatgaagaagctgacaggcaagcgaaggatggtttgaggtgctgggtattggtgctaggtatcaagagctgctgccttctgttatcatctcaggtcaggttggaggcgctggtcaattgatgggtctaagttgatgaatactagtgtattgatcaatggatgcccataaggctgtgccaatccttagttataatgattatggttatggtcagtgtcaggctgtagaaataatcctgtgttgtgtccctttgaattgtagaataatcgtctgtaataatttcgatatactttcgtggtccaagacatcataaatctaagtgattagctactaatttttctgtga

SEQ ID NO: 873 - DNA, 2275 bp, Oryza sativa
  source 1..2275: mol_type = genomic DNA
acactagtcgtcgtcgagaggcgcggaggcaacgccgtgtggtcgccatcgccatcgccttcctcctcctcctcctccgccgccgcgcgcttcctcgccaccgcgcgcccagggccatcggcggcggacgccctcgcccacgcgcgcgagagaggggggcgagagattatcggacgagtcgctttgcggagctttctagaatggtggactgggcttcagatagcgacaatgataagttcgagtgggacacagacggtgaggctgagacctcatctgccccggccctaaggaacatagatgctcctggtccgtccacgaggctgccgcaggatgcaaatgggaaggccaacgggtcaggtgctttggttgctgaatttatgggaatgggattcccaaaagaaatgatcttgaaagcgattaaggagattggtaacgataacaataatctagttctcttatttgcttctggttgcattttgaatcttctgtttcaactgctgtcttttctttcaggggatacagatacagagcaattgcttgagttacttctgacttatcaggtatttgcccacatggttgcatcactctgtttattattatctaatgctctactgtacaagtgatgccgtgtaatgcaggcaataggcggtgacgcttcagtgggtaactgctctgcttcggcctgtgccccccagactcttgaagtcgacgaggaggaggatgatactaattgggatgaatatgatactgctggcaattgtgacaggactcctcactctgatggttctggtgacgaggatttctttcaagaaatgtcagagaaggatgaaaaaatgaagtccttagtcaacatgggttttcctgaagatgaagcaaagatggctatcgatagatgtctcgatgcgcctgtagcagtgttggttgattcaatctatgcatcacaggaagcaggaaatggttactctgcaaacttatctgactatgaggatacagagttcagttcctttggaggaagaaagaaaacaagatttgtggatggaagcaagaagagaaagcggtatggaagtgggccatctgggaatcaagtgccgtttgatggcagccacgaagagcccatgcctcttccaaatccaatggtgggattcagcttgcccaatgagaggttaaggtcagtccacagaaatcttcctgaccaagctcttgggccaccattcttttactatgaaaacgtggccctagctccaaaaggtgtatggacaaccatctcaaggtttttatatgacattcagcctgagtttgtggactccaagtacttttgtgctgctgccaggaagaggggttatattcataacctgccgattgagaacaggtcacctgttctcccaatgcctcccaaaacaatatctgaagcctttcctaataccaagaggtggtggccttcctgggatccaaggaggcagttcaactgcttgcaaacttgtatggcaagcgcaaagcttacagagcgaattcgttgtgctttgggtagattcagtgatgtaccaactccacaagttcagaagtatgtcttggacgaatgtaggaaatggaacctagtttgggtcggaaagaataaggtcgctcctctagagcctgatgagatggagttcctgttagggtaccctagaaaccacactaggggagttagcaggacggagaggtacagggctctcgggaattcattccaagttgatacagtagcataccatctctctgtgctgagggacctgtttcccaatggaatgaatgtcttatccctgttttctggtattggaggagcagaggtagctctccacagactggggatacatatgaaaacagtgatctctgttgagaaatcagaagtgaacagaacgattctgaagagctggtgggatcagacacaaactggaacgctgattgaaatcgccgacgtgcggcatcttactactgaaagaattgaaacattcatcagaaggtttggcggttttgacctggtgattggtggcagcccgtgcaacaaccttgctggcagcaaccgccatcaccgagatggtctggagggcgagcactccgcgctcttctacgattacattagaatattagaacatgtaaaggctaccatgtcagcagtctagtttaagctatcacattaactaactctgtgatttattgttgttaacgaagttagaacctgttgattgatattgctgaacctgatgtgatgttattgcactcaaacaggagtgttttttcc

SEQ ID NO: 874 - DNA, 1314 bp, Oryza sativa
  source 1..1314: mol_type = genomic DNA
atgaggatagcgagttcgagtgggatactgatggatgctaatgggaaggccaatggatcagcaccatcagctttggtggcttactttttgggaatgggtttctcgagagagatggtcttcagagctatcaaggagattggtaatgataacaataatacatttcctcatttgcttcaactgttgccgtttctttcaggggacacagattcggagcaaattcttgagttacttctcacttatcagattcttgaagaagaagatgaggaggaggatgttaattgggacgaggatgatactgttgacaattttgatagggctacttactctgatggttctggtgatgaggactttttacaagagatgtccgagaaagatgagaaaatcaagtccttagtcagcatgggttttcctgaagatgaagcaatgagggctattactagatgcggtctggatgcgtctgtagatttgttggttgagtcaatctatgcaccagcatctgcaggaaatgtttattttacaaacttatctgactatgaggatacagagttcagttcctttggaggaagaaagaaaacaaaattaatagatggaaccaagaaaaaaagagaacggtatagaagtagaccacaatggaatcaagtgccatttgacggcagccatgaagagccaatgcctcttccaaatccaatggtgggattcagcttgcccaatgacgggttaaggtcagtccacagaaaccttcctgaccatgctcttggaccaccattcttttactatgaaaacgtggccctagcaccaaaaggtgtatggacgaccatctcaaggttcttgtatgacatttatcctgagttcgtagattccaaatacttctgtgctgctgctaggaagaggggttacatccataacttgccgattgagaacaggtcacctgttcttcccattcccccaaagacaatatctgaagcctttccttctactaagatgtggtggccctcttgggatccaagaaggcagttcaactgcttgcaaacttatgtggcaagcgcaaagcatacagaacggatacgatgtgctcttggtagattcggtgatgcactacctccagcagttcagaagagtgtcttggaagaatgtaggaagtggaaccttgtctgggttggaaagaacaaggttgctactctagagcctgatgagatggaattcctattgggataccctaggaatcataccaggggagttagcaggaagcgagatatagagctcttgggaattcattccaagttgatacagttgcataccacctctctgtgctga

SEQ ID NO: 875 - DNA, 1422 bp, Oryza sativa
  source 1..1422: mol_type = genomic DNA
atgaggatagcgagttcgagtgggatactgatggatgctaatgggaaggccaatggatcagcaccatcagctttggttgcttactttttgggaatgggtttctcgagagagatggtcttcagagctatcaaggagattggggacacagattcggagcaaattcttgagttacttctcacttatcaggcgataggcagtgacccttcagtgggtaacagctctcattctgcctgtgacccccagattcttgaagaagaagatgaggaggaggatgttaattgggacgaggatgatactgttgacaattttgatagggctacttactctgatggttctggtgatgaggactttttacaagagatgtccgagaaagatgagaaaatcaagtccttagtcagcatgggttttcctgaagatgaagatacagagtttagttcctttggaggaagaaagaaaacaaaattaatagatggaagcaagaaaaaaagagaacggtatagaagtagaccacaatggaatcaagtgccatttgacggcagccatgaagagccaatgcctcttccaaattcaatggtgggattcagcttgcccaatgacgggttaaggtcagtccacagaaaccttcctgaccaggctcttggaccaccattcttttactatgaaaacgtggccctagctccaaaaggtgtatggacgaccatctcaagattcttgtatgacatttatcctgagttcgtatattccaaatacttctgtgctgctgctaggaagaggggttacatccataacttgccgattaagaacaggaattataccaggggagttagcaggacagcgagatatagagctcttgggaattcattccaagttgatacagttgcctaccacctctctgtgctgagggacatattccctaatggcatgaacgtcttgtccttgttttctggtattggtggagcagaagtagctctccacaggcttggaatctgtatgaagacagtggtcttagtcgaaatatcagaggtaaacatgacgttgctgaggagttggtgggaccagacccaaactggcacgctgattgaaatcgcagatgttcaaaatcttactgctgaaagaattgaactattcatcagaagatttggtggctttgacctggtgatcgggggcagcccgtgcaacaacctcgctggtagcaacagataccaccgtgatggcttggagggcaagcactcagcactattctatcactactacagaatcttggattctgtaaagactattatggctagcatttttggtgcgaaaggaaagttgtttcgccatgttcgcaaggcccttctgttgaaacaatcctcctccttgacactgaaaactgaacaagatccttccaataacagtgataaggattccatggacaaataa

SEQ ID NO: 876 - DNA, 4377 bp, Oryza sativa
  source 1..4377: mol_type = genomic DNA
atggccgacgacgaggctgccgtcctcccgcccccgcctccgctgccgccgccttgccgcccccacaggcagctccgcccgagggggtctcgaccgactgctgataccacccctcgcactagccagttggtggaggtgttcgaggcggcgctgcgggggaacaccatcgcggtgctcgacacggggtccgggaagaccatggtcgccgtcatgctcgcgcgcgagcacgcacgccgggtgcgcgccggggaggcgccgcggcggatcgtggtgttcctcgcgcccaccgtgcacctcgtccatcagcaattcgaggtgattcgtgagtacactgacctcgacgtgatgatgtgctctggagcatcgcgggttggcgaatggggcgccgatcattggaaggaggaagttgggagaaatgagatcgttgttatgacgccacagatactgttggatgctctgcggcatgcttttctgacaatgagtgcagtgagcttgctaatatttgatgaatgtcatcgtgcttgtggaagccatccatatgcacgaataatgaagatatacatcgtagaagatcgaaatgagcttgagagcttttcccctcctacaacaattgtgaacaaatactatgatgcttacatggttgattttgataatctgaaatcaaagcttcagatattttctgatgagtttgattctttgttggttggtcttcaagaatcgccatctaataaatttaaagacaccgataatatcctagagacttcaagaaagagcttgtccagataccatgggaaaatattgtacagcctaaacgatcttggtccaattatcacctctgaggtagtcaaaatacatattgaaagcgttaagccattatgtgattctgaagactgcattttttctaaagctagcttgtgcttacatatgtcttattttaaagaagctttaagtctaatagaggaaattcttccacaaggatatggtgaactaatgaaatcagaatctggttctgaggaattaactaaaaggggatacatttcttcaaaagtgaatacgctaatcaacatcttcaaatcgtttgggtcatcaaatgaagtgctttgcctaattttcgtagacagaattataacagctaaagccgtcgaaaggtttatgagaggaattgttaacttctcttgtttttcaatttcttacttgactggagggagtacatcaaaagatgctctgagtccagcagttcagagatttactttggatttgttccgagctggaaaggtgaacttgctttttacaacagatgtgactgaagagggcgtcgatgtacctaactgttcttgtgtgatacgcttcgacctacccagaactgtttgtagctatgtccaatctcgtggtcgtgctagaaggaacaactcggaatttattcttatgattgagaggggaaacttgcagcagcaagaacacatatttcgtatgatacagactggttactatgttaaaaactgtgcactctatagacaccccaatgctttatcctatgacttgtctatccaagggatgtacacctaccaagttcagtcaactggagcaactataaccgcagattgctgtgtcaacctaattcgtaaatactgtgagaagcttcctaaagataggtatttcatgccaaagccttcctttgaggtgaccattgaagatggattattcaaatgcacattgacgctacctcgaaatgcagcatttcaaagtatagttggccctttaagcagttcaagtaatttatccaagcagcttgtatccctagaggcctgcaagaaattgcatcaactgggagaacttaatgatcatcttgtacctttgactgaagaacctatggatacagatttcactacagcagatgaaaaatgcatatctggaccaggaacaactaaaaggaaggagcttcatggtactacatgtgttcttgctttatcaggaacttggattcatgacagtgaaaatattacactgaatacttacagaattgattttctttgtgaccaagagggtgaaaactatgctgggtttgttctcttaatggaaccagaacttgatgatgatgtggcaccctcaaaaatggatctgttcctgatccctaataaaatggtctacaccactgtaactcctcgcggaaaagttcaactaaacaaaaagcagttaggtaaagggaaattgttccaagaattctttttcaatggaatctttggtagattatttcatggttctcgaaaaagtggagcacaaagggattttattttcaaaaagggtcatgaaatacagtggaacacggaaagcatgtacttgcttttacctttgagggattcttcatatatccaggatgacctaagcatacactgggaagcaattgaatcttgtgctggtgcagttgagcagttgtggagttcgtatcaaggagatgaaaatgtcattcctgtaaattgtattccacaaaaaagaagagggggccaagaagaaattattcatctggccaataagtctcttcattgttccagcatcaaagattcagtcgtgctatcactgcatacaggaaggatatacactgttcttgatttgatcttagacacaactgcagaggactcgtttgatgagatgtatggctccactggcaaacctctgctcatggaaaaagaacaaattcatgctcgggttccacctgaactacttatccatctcgatattttggaagctataacaactttaagatgctgtgagacattttctctggagcgtttagagctgttaggagactccgtgctaaagtatgtggtaggatgtgaccttttcctaaggtatcctatgaaacatgaaggtcagctctctgatatgagatccaaggctgtctgcaatgctacacttcataaacatggaatatggcggtcgttgcagggttatgtacgtgataatgcttttgacccacggcgttgggttgctcctggacagatatcgttgcgcccttttccttgtaactgtggaatcgagactgcatttgttccttctcatagaaggtatatccgagatgacccatctttttttgtgggaaaaccatgtgacagaggtcataggtggatgtgctcaaaaacaatatctgattgtgttgaagcactggttggagcatattatgttggtggtggcattgctgctgcactttgggttatgaggtggtttggaatcgatatcaaatgtgatatgaagctattgcaggaagtgaagttcaatgcatctcatttatgctccttatcaaaaataaatgacattgaggaactggaagcaaaactgaagtacaacttctcagtcaagggccttcttttggaagccataactcatccatctctgcaggaattaggtgttgattactgttaccagcgtcttgaatttcttggtgattctgtgctggatctacttcttacacgtcatctctatgctactcatactgatgttgatcctggagaattaacggatttacgctccgctttggttagtaatgagaattttgcacaagcagttgtaagaaacaacattcacagtcatctacaacatggatccggaatacttttggagcaaattactgaatatgtcaggtcaaatttggagtgtcaagggaaagagagtgaattccttcaacatactacatgtaaagtacctaaggttcttggtgacattatggaaagcatcgctggtgcagtatttatagacaccgattttaatgttgacatggtttgggagattttcgagccattgctttctccactgattacacctgataagcttgcattgccaccttaccgtgagttgctggagctatgcagtcacattggttgcttcttaaattcaaaatgcaccagtaaaggagaagaagtaattatagagatgtcactgcaactacgagatgagctgctggtagcacaagggcatgacagaaacaaaaagagggcaaaggcaaaagcagcatctcgtattttggcagatcttaagcagcaacagggtctttcaattaaacaatgtttgtccaaggctaaacagctggatatcgtgacttcagatcttcagtttgacttgacaagtttgtgcttccactcaaaatggagaaaggtggacctcgaagtgcgcttttcaagctatgcaagattttgcagtggccaatgccagaattcgaatttgtggaacaaaggttcaggactcctattgttatggatggggcgacaacaacaaacttcaatagctttgtttcgacaatcaccttgcacatacctgacgcaacaaccattacatttcaagtgtttggagagattaaagatacgtcttagagaaagcacttggtag

SEQ ID NO: 877 - DNA, 5862 bp, Oryza sativa
  source 1..5862: mol_type = genomic DNA
gtcacgcattcccgcgaatccggcctgctcgagacctcctcccgtcgcgacgccgcaagccatcaaagcgcctcctgcttccgctcctatccaaggcgaaccacactctgcgatcgagagctcgctgagccgtaaaaccctagctaatccttctctctccccccctctcgctgtcgtctccgtctccgtctccgatctccgcggcctcggttgcgggctgcggctgcgccggtgcggctccatggtcccggagccggctcccgcggcggcgacggagccgaggcgctccacgcgcaggcgcctaatgacggccgccgcgatggaggccgaggcggaggcggtggccgacctcgacgagatcgaccgcgagatgtcgcgcgccgagtcgcgcaagcgccagcgcaggacggcgaaggagaagcctggtgcccgtaagggagcgaccgaatggaagccggaggacgtggagaaggcggcggcggcggagggggtggccgagctcgacgagatcgaccgcgagatgccgcgccccgagttgcgcaagcgccagcgcaggacggcgaaggagaagcctagtgcccatgagggagcgaccgaatggaagccggaggacgtggagaaggcggcggcgcaggagcccgaggggaccgagctcgacagtgggttgtcgcccgcagagtcacgcggcaagcggcagcgcggggtggagaaggtcaagcgtcgtacccgtaagaagacggccaaggagaagacgaaggagacgaccgagaagtcggcggctcaggcgcccgagaagatgaaggtgaacgatgcgggtggcgcgctggccgaagacgtgtgcgcggatgagccggacgccgaacagatggccatggaggaggaggaggaggcagccgacgtgctggaagcagaggagaggatgggtaagtgtgtcggagaaggatcagccgagaaggctgcgacgaggaagagggtggcgcggccaagcactgcgagaagggtggaggactcagatgaccactttgtgggcgatccagtaccggatgatgaagcgcgacaacgatggcccgtgaggtacagtagaaaggggtctgattcgcttcttaagcaggagcctgacgaagatgaagaaatgaaggctcgatgtcactacctggctgctaatgtggatgatgaaatctatcatcttgatgatgatgtctatgtcaaggctggtcctgatgaggaaaattacattggacggattactgaattttttgaaggagtcgaccgtggatcatatttctcttgtcagtggtttttccgtacagcagatacggtcatctcatcaaagttgttaaaggtgcatgatcatagacataaccataagcgtgtttttctttcaaaggagaagaatgacaacttgattgagtgcatagtctcaaaagtaaagattgcccatgttgatccaaatatgacgcctcaagcaagagctcatgctatatctgattgtgacctgtactatgacatgtcttactctgttgcatattccacgtttgcaaatcttccagcagataatgatggtgcattggggagtgaggcaacatcaaatatttcctgcgatgatgctgacaattcttctaagggaaaattgtcggctgatattgtggcaccatatagtgaacaaacagagacagcttctctgcttgatctttactcaggatgtggcgctatgtcaactgggctttgtttgggttttgcattttctggcataaatttagagactaggtgggctgttgacataaacaaatatgcttgtgcttgtctcaaacataatcacccatactcgcaggtgcggaacgagaaaactgaggattttcttgcccttattcagcagtgggatgcactttgtagaaaatatgttgtccacaaaaacgatacactagaacctagtatagatatgcccttaaatgatgctgacgatgtaaatgagcctcttccagaagatatattcgatgtagaggagctccttgagatatgctatggtgatccaagtaacacaggaaaaaatggcttgtggtttaaggtgcggtggaaagggtatgatccaagttatgatacatgggagccaattgatgggctcagtgattgccctgagcgtattaaagaatttgtagagaaaggacacaaggaaaatattttgcccttgcccggtgctgtggatgtcatatgtggtgggcctccatgtcaaggcatcagtgggttcaaccgattcagaaagcataatgatccacttgaggatgaaaagaacaaacagttggttgtttttatggatatagtgaagtatctgaggcccaaatatgtcctcatggaaaatgttgtggacatattgaaatttgcagatggattccttggacgctatgcaatgagttgccttgtggctatgaattatcaagctaggcttgggatgatggcggcaggatattatgggctaccgcagttcagaatgcgggcatttctctggggagcccttccatcaatggtattaccaaaattcccacttcctacccatgatgctgttgtgcgtggaatagtaccaactacattttcgcaaagtgttgttgcatacaatgaggtagacacccgttgcctacgaaaggctcttctccttgcagatgccatatctgatttacccaaggttggaaatgatcaacctaaagatgtaatagagtatagtgttgcccccaaaactgaatttcaacggtatatccggaacaaccgtaaagacattcaggattactcttttcgtggagatgatccttctgaagaaggtaaattgtttgatcatcaacctctaaagctaaacaaagatgattatgagcgtgtgcagcggatacctgtaaaaaagggagcgaactttcgtgatctaaagggcgtcatagttggcccagataatactgtgcggctggatccaaacatttcccgtgaacgactgtcatctgggaagcctttggtgcctgactatgccatatctttcgtcaaggggaagtcaactaaaccgtttggacgcctgtggtgggatgaaactgttcccactgtagttaccagagctgagcctcacaaccagattattttgcatcctagccaagaccgagttctgactattcgcgagaatgcaaggttgcaaggttttcctgactattacagattgatcggcccactaaaggagaaatatatccaggttggcaatgcggttgcaattccagttgctcgagctttggggtatgctcttgggctggcctaccggggtgaatctgatggagatcgagcagtactcaaattgccagagagttttatttatgctgatcaagagacggttgttaaatcttcggcaggaactcctggaagtgaaatagctgattcggaacagttgtttgaatatttcataaaccccaatttcttttgcatgatgtttgcttttcttaaagtgaatgtggttattcccttgatcctagattctaagatgggtttatcgcgacgaggagccgaggagggggaggcgcgccgcgccgttccattccagaacatcctctcgtgggaggggtggaatcgtcttgatcatcgccggggcgagatccgtctcgacgtccggcgggaaatggacgattccccgctagataatctgtttgatggaaatggattggattcatcggcaggcgcggacagctctagctccacgggatcaccgccgagctccacgtcgtcgtcccctccgtcgtcgcagtcacctcctccggggtcatcgccgcctcctgccagcccgccaccgtccacaccgtcggccccaccgaccaattcctcgggctcagcaccgtcgccaccttccccgtcgcagtcggcgccaccggcgaataccggcggcggcgggtccccaccaccatcgcatggctcgccgccagcgccaaaggccgtccagtctcaacccgctccgaagcgtagcggcgacggtggctcctcctcggacagtgggagctccaaggagggaggcagctcgagtgaccgtggcaagagcgaaagcaacggcaacaggccggggccagaggctgccatcatcgccggcatggtcatcgggttcttcaccttcgccctgctgctggccatcgtcgcctgcgtgtgctgctccaagaagaagaagagacctccccacatgcacatgccgtactacaccgacgagaacgggaaagtgtactacgcgaacagcatgcccaggtggcagaacagcgtggaccaaggcggcggctggcacgcgcagtactcgccaggccaggcgccgccgagcagcgagatgagcgggtcgcacggggcggggccgctgccgccgccgtcaccgggcatggcgctggggttctcgaagagctccttctcgtacgacgagctggcgctggcgacgggcgggttctcgtcggcgaacctgctggggcagggcgggttcgggtacgtgtacaggggcgtcctcgcgggcagcggcaaggaggtggcggtgaagcagctcaaggccgggagcgggcagggcgagcgcgagttccaggccgaggtggagatcatcagccgtgtccaccaccgccacctcgtctccctcgtcggctactgcatcgccggctcatcccagcgcctcctcgtctacgagttcgtccccaacgacacccttgagcaccacctccacggtctccatatctttcctgctcttttcccagccatcgtaacgcgccattcggaagggcgtgccggtgatggcctggacgacgaggctcgccatcgcgctcggctcagccaagggcctcgcgtaccttcacgaagatttctgcagggacaaatcctgtctgtacgtccttctaacgatctgatttgttgcattgtggttgtcacgtacgaaggccatcctaggatcatccaccgtgacatcaaggcggccaacatcctcttggacgagaatttcgatgctaaggttgcggatttcgggcttgcaaagctaaccacggacaccaacacgcatgtctcaacgcgcgtcatggggactttcgggtatctggctcccgagtacgcgtcgagcggcaagctgacggacaaatcggacgtcttctccttcggcgtcatgctgctcgagctgatcaccggccggcgaccggtcgacccaacgaactacatggaggacagcttggttgactgggcgaggcccctcctggcgcgcgccttgtcggaggacggcagtttcgacgagctgatcgaccagcgcctggagaacaagttcgaccggctggagatggagcgcatggccgcatgcgctgccgccgccgtccgccactccgccaagcgccgcccaaagatgaagcagattgtccgtgcgctggagggcgacgcgtcgctggacgacctgaacgaaggggtgaagcccgggcagagcatgatgttcagcacggggtcggagtacgactccggcaactacgcttccgacatcaacaggttgaggaaggtggccttcgagagcagcatcgaggacagcagcgagtacgggacccactccagcgccgactcgggggagccaccccggcggcaacagcatcgctagccgtatgatcggaggcgtcgagctagacttgactatttcttcggtgcgtgagtgtggaaagtggaaactgtgtggtgttgcgagatggcgaatcatcgatgggaaccggggcgtaccgtgtatgtgggaattgggatactgtcgtgcatattgcaggccgatcgtttgacgtgactgctttgttggctgtattatcgtgtgatttaatgatgtatccgatcgatgagtaatgcgatattgcgcttatcttgcatata

SEQ ID NO: 878 - DNA, 1472 bp, Oryza sativa
  source 1..1472: mol_type = genomic DNA
agggttgaaagcatgtttgaaaaagtgaaagcaaaccttcctggtcctcctgaatttttgctgtgtgttttaccagaaaggaaaaattgtgatctctatgggccatggaagaagaaaaaccttcatgagatgggtattattactcaatgcattgttcctagtgttaagatgaatgatcagtactataccaatgttcttctgaaaatcaatgctaagcttggtggaatgaactccaagctttcattggagcatcgacatatgattcccattgtcaatcaaacacccacattaattttgggaatggatgtttcacatggttcgccaggtcgagctgatgtaccatcaattgctgcggttgttgggtccagatgttggccgctgatatcacgctacagagcatctgtccggacccagtctccaaaggtagagatgattgattctctttttaagccactggacgatggaaaagatgatggcataataagggaacttctactggacttctacaagaccagtcaacaaagaaagccgaagcagataatcattttcagggatggtgtgagcgagtctcaatttagccaagtactgaatgttgagcttaatcaaattataaaggcatatcaatatatggatcaggggccaattcctaagttcacagtgatcattgctcaaaagaatcaccacacaaaacttttccaagaaaatactccagacaacgttcctccagggactgttgtagattctggtattgttcatccaagacagtatgatttctacatgtatgctcatgctggacctataggtacctcaaggcccacccattaccatgtcttgctcgatgagattggtttcttgcccgatgacgtgcagaaactagttttgtcgctttcttatgtgtatcagaggagcaccactgcaatatctgttgtggcacctatctgttatgctcatctcgcagcagcgcagatgggccagttcatgaaattcgaggaattcgctgagacttcgtctggaagtggtggtgtcccttcgtcatcaggagcagtggtcccagagttgccgcgcctgcatgctgatgtctgcagttcgatgttcttttgttgaggtggtgttagtcagctagtgtgcagcagggctgatccttcttttttttttgaaggaaccaaatacggagtacttgttaggcacttttgtagtactctagattgatactatgagatacatctaggttgggtagggagcatttttttttagatgatatagtgctcctaatgatatagttctgttagtgctcagctattaggaagtaaaggcttacccttgatggtaggtttatgaattcaagacgctaactttgcgccatatctaattgtcaaccagttaaacagatgattcgcacatgcctgtttcgctctcagttgtatccgcatcttattttttgcatttttttcatatatttgcaccatcgtgat

SEQ ID NO: 879 - DNA, 3528 bp, Oryza sativa
  source 1..3528: mol_type = genomic DNA
atcaaccctctctctctctctctctctgcctcggcgacctcgcctccgcttactctcccacccagacaaaaccctctttgcctctcatggcgtcacgcggcggcgacggcctcgtcggaggagggcgcgggcccctcggtgggcgggacggtagagggcgcggcccggccggtgggcgaggcggcggaaggggaggcggccacccgcagcagcagcagcagcagcagccgggctacggccgcggcgacgggggcggccgtggtcctgcccctgctgctggtggtgtcgttggtcgaggaactggaggcggcggcggcggcgggcgcggggacggcggacgcggccgtggccgtggcggcggcggcggagatggcgttcgccctgctatggccgcggctccggcggcgtcgactcctggtccggttgctgttgctgctcggagtactcctcctcctactcccgcggtccagatccccgcggtggcgtcgtcgtcgtcagcgcagccagcggcggcggcgcagcctcctccggcagccgcggcggtttctgccctcgcgagggacgttgggaggcagctggctgtcgtggcgggcggcggccgccccgctccccccgcggcgccgccggcgcccatcccggtgtcgagcaagggcgtcgcgccaccgtcgcggccggggttcgggacggtgggggagaggatcgtggtgcgcgcgaaccatttcctcgtccgcgtctccgacaacgacatgatctacctctacgacgtgagtttgagtcccccaccaaagaccaggcgcatcaacagggtagtgatgtctgagctggccaggttgcaccgtgagtcgcatctcggtggcataagcttcgcgtacgacggaagcaaggccctgtacactgcaggaaaactgccgttcgactccatggacttcaagatcaagctgggcaaagagctcagggaaatcgagtacaaggtgacaattcgacgtgctggccaagcagatctgcaccacctgcacgagttcatcgccggccggcagagggactctcagcagcaaacgatccaagcactggacgttgtactgagggagtcaccttctctgaactatgtcatcgtttctcggtcgttctactccactatgttcggccgacaagacattggtgatgggctggaatgctggaaaggatactatcagagcctgcgcccaactcagatgggactctcattgaacatagacatatcctctaccccattcttcaaacctatcagcgtggtagaatatgtcaagaattgtctgggcacacctactaatgctaatggccctgaccctaggcggcctctttctgacattgatcgcctgaaggttaagaaagcactacggggagttcgtgttgaaacaacacaccaggggaagagcagcaagtacaagatcactacgattacatctgagccactgagtcagctgaacttttctatggatggaactacccagactgttattcagtacttctcgcagcggtacaaatacaggctgcagtacacgtcttggccctgtctgcaatccggcaacccttctaaccctatatatttgccaatggaggtatgcaccattgtagaagggcaaagatactccaagaagctcaatgacaaacaagtgactggcctcctgagagcaacatgccagcctccccagaaaagggagcagaaaatcattgagatggttcaacacaacaactacccggctgataaggtggtgagtgattttagaattaatatttccaatcagatggccactatgccagctcgcgtgctgcctgcgcccacgctgagataccatgactctggaaaggagaaaacttgtaatcccagagttgggcaatggaatatgatcaataagaaaatggttggtggagctgtggttcaaaagtggacttgcgtgaatttttcacgcatgcatattgatgccgtgcacagactatgcggcgaactagtttatacatgcaatgctattggcatggttttcaatgaaatgccagagatagaggtggggtcagctgctcctaataacatcgaagctgccctgagcaacattcacacaagggctcctcaactccagctgctcattgtgattctcccagatgttaatgggtattatggaagaattaagagggtgtgtgagactgaacttgggatagtatcccagtgcctcaagccaggccgcaagctcttgagcttagacaggcagttcctggaaaatgtctcactcaaaatcaatgtcaaggctggaggacgcaactcagttcttcagagacctcttgtacccggtgggcttgaaaacacaacaataatttttggtgccgatgtcacccatcctgcttctggagaggactcatcggcgtcgatcgcagctgtggtggcctccatggactggcctgagatcaccaagtacaaagccctcgtctctgcccagccacctcggcaggagattatacaagatctcttcaccatgactgaagttgcgcagaatgctgatgctccagcacagaaggctgaaggttcgaagaagaatttcatatgcggcggaatgttcagggagttgcttatgtcattctacagtaagaatgctaaacgtaagcctcaaaggataatattttacagggatggtgtaagtgatggacaattccttcatgttctgctctatgagatggacgcaatcaagaaggctattgcatctttggacccagcatacaggcccctggtgacatttgtggttgtccagaagaggcaccacacaaggctcttccctgaggtgcatggaaggcaagatctgacggacagaagtggaaatgttcgtccaggaaccgtggttgacactaacatttgccaccctagtgagttcgacttctacctgtgcagccatgccggaatccagggaacaagcagaccaacccactaccacgttctccatgacgagaaccgttttagtgccgatcagctgcagatgctcacttacaatttgtgttacacctacgctcgatgcacccggtctgtctctgttgtccctccagcctactacgctcacctggcagcattccgggcgaggtactacgatgagccccccgccatggacggagcttcgtcggtcggcagcggcggcaaccaggcggcggccggcggccagccaccggcggtgcgccgcctcccgcagatcaaggagaacgtcaaggacgtgatgttctactgctgatcgaatcggcgcctagcttgggttttaactacaaacattttgttggtcgctcgtcagtattcattcaggctgttagtgtactgtgctatctctgaaattgtgatggtgtcatttgggacatgttaacctgttgttgaacttgtgatctgtgatgttgatgcagctgctactcgatagttgtatgtttctcgaagtgtatttttttggggttatgtgtgatgtttgaaagacaggtcatgatctaaattatttctgcggattagttgacatgccatgatctaaa

SEQ ID NO: 880 - DNA, 3452 bp, Oryza sativa
  source 1..3452: mol_type = genomic DNA
ctcacccactccccaccccttcccaaaccctcacctccatctcgttgccttcctccacctctctctctgccatggcctaccgcggcggaggccgaggtggccgcggcggcgagcagcggccgccctactccggccgcggcgacgtccctggccgtggtggcggtggtggtgggggtggagccccgccgtaccgtcccgcctcgggcttcgtgtggccgccgccggggatgacgccgcggccggggcctcctcagccgcagtacccgcggccggggccgccggccgtcgtctacggcgcgccgatgccggcggcgcaccaccagggcgcgtaccagcccgggggcgtgtaccgtgcgccctccccgggggttccggtgatcggtggctacgcgcgcagcacgcccgtcaccatccgggcgcctccgccgtcgcactcgtcggctccggctccgtaccagccggcggcggccgcgccggctccctcgtcgtcctccacggcgccgtccgctacggctctggccaaggagttcgagcagaagctgttcgtgtcggagaccgcgctggcgccacccgcggcggtggcgtcggccgcggccgcgccggctggcgaggcgtcggtggagtcggacaaggatctggcaccggtgtcgaagaaggggctcgcccaccctgcgcggccggggttcggagcggccgggaagaaggtgatgatccgcgcgaaccacttcctcgtcaatgtcgccgacaacaacctcttccactacgatgtttcaatcaatcctgagtcaaaatcaagagcaacaaatagggaagtactcaatgagctcatcaagttgcacgggaagacatctcttggtggcaaattgcctgcctatgatggaagaaagagtctctatactgctggttcactcccttttgaatcggaggagtttgtggttaagctaattgatcccgaaaagaaggataaagaaagggcggagagggagtacaagatcacaattcggattgctggcagaacagacttgtaccacctccagcagtttttgcttggaagacagagggatatgccccaagaaaccattcaagttcttgatgttgtccttagggagtcaccatcttggaattatgtcacagtgtccagatccttcttctctacccagtttggtcaccggggtgacattggtgagggacttgagtgttggagaggttactatcagagcctgcgcccaacacagatgggcctttcgctgaatatagatatatctgcaacgtccttttttaagcctgtgacagtgatccaatttgtggaggagttcctgaacatacgtgacacctcaagacctttgtcagaccgggatcgtgtgaagataaagaaagcattacgtggggttcgcattgaaacaaaccaccaagaggaccaaatcagaagatacaagataacagggattacccccattcctatgagccagctgatatttcctgttgatgataatgggacaaggaagactgttgttcagtacttctgggataggtacaattacagactgaagtacgcttcttggccctgcctacagtctggcagtgattctcgccctgtatacttacctatggaggtgtgcaagattgtagaagggcagaggtactccaagaagcttaatgacaaacaagtgaccaacatccttagagcaacctgtcaacgcccccagcagagggaacagagcattcatgagatggttctccacaacaagtatacagaggataggtttgctcaggagttcggtatcaaggtctgcaatgacctagtctctgttccagcccgtgtgctgcctccacccatgttgaagtatcatgattctggaagggagaaaacttgtgcacccagtgttggacagtggaacatgattaacaagaaaatgatcaatggaggaactgtggataactggacatgtctgagtttttcacgaatgcgtcctgaggaggtacaaaggttctgtggtgacctgattcagatgtgcaatgccactggaatgtctttcaatccaagaccagtcgtggatgtccggtcaacaaatcctaacaatatagagaatgctctgagggatgttcacaggagaacatcagaactgctagccagagagggaaagggaggcctgcagcttttaattgtaattctgcctgaagttagtggttcttatgggaaaattaaaagggtctgtgagactgaccttggcattgtatctcaatgttgtttgccaaggcatgccagcaggccgaacaagcaatatttggaaaatgttgcactcaaaatcaatgtcaaggtcggagggcgcaacactgttcttgagcgagcctttatccgcaatggcataccatttgtgtcagaagtcccaacaatcatctttggcgctgatgtcacacaccctccacctggagaggactctgcatcatctattgctgcggttgtggcatctatggattggcctgaaatcaccaaataccgaggtctggtctctgctcaaccacatagacaggagataatagaagatctctttagtgttggtaaagatccagtgaaggttgtaaatggtgggatgatcagggagttgcttatcgcattccgcaagaagactggcagaaggcctgagaggataatcttctatagagatggtgtaagtgaaggtcagttcagccatgtgcttcttcatgaaatggatgccatcagaaaggcttgtgcatctttggaggagggatatctaccacctgtcacatttgtagtagttcagaaaaggcatcacacaaggcttttcccagaggttcatgggaggcgagacatgactgacaagagcggaaacatccttcctggaactgtcgtggaccgtcagatttgccatcctacagagttcgatttctacctgtgtagccatgctggcatacagggtactagcaggccaactcattaccatgtcctttacgatgagaaccattttacagccgatgcacttcagtccctgaccaacaatctttgctatacctatgcgcgatgcacccgggcagtgtctgtggtcccaccggcctactatgctcatcttgctgcattccgcgctcgctactacgtggaaggagagagttcggatggtggctcgacccctggcagcagcgggcaggctgtggcgcgagagggccctgtggaggtgcgccagcttcccaagatcaaggagaacgtcaaggacgtcatgttctactgctgaggagattgttggcaaggagagcccaatattctggtagttttttggttggtagacttgtttgtgtccttggtttggagctggttgcttgtagttccatttgctgtttccgagtagccggattgtgactgagcttttgtggtctttaaggccttaactctgcttgagacaatgcaagtcttttaaatttccctgtggcttttgtta

SEQ ID NO: 881 - DNA, 3193 bp, Oryza sativa
  source 1..3193: mol_type = genomic DNA
atggcgccgccccggcaccagccggcagctgggaaggcgggcggcgggcgcgggcatgggcatgggcatgggcatggtggtggtggtggtgggccggcggcgaggaagcagccgttgcagagtagcatggcgcagcccaaggcggagacggcggcggcgacggcggcggtcgcgccgccggagggagggaagaagtgcggcggcggtggcgggaggcggcgcggcgggcgcgggcgcggcggcagggcgggtgcggggccggggccggggctggcggcggcgccggccgtggtggtggcgcccgcggcgcgcgccgtcattgggccgccggtggcgagcaaggggctgtcgttctgccggcggccggggttcgggacggtgggcgcccggtgcgtcgtgaaggcgaaccacttcctcgccgagctccccgacaaggatctcacccagtacgacgtgaagatcacgccggaggtgagctcccggagcgtgaaccgggcaatcatgtcggagctggtccgcctctaccacgactccgatctcggaggtcgcctcccggcctacgacggccgcaagaacctctataccgccgggacgctcccgttcgacgcgcgcgagttcgtcgtccgcctcaccgacgacgacgacggcaccggcgtcccgccacgggagagggagtacagggtcgccatcaagttcgccgcgcgcgccgacctccaccacctccggcagttcatcgccgggcgccaggccgacgcgccgcaggaggctctccaggtgctcgacatcgtgctccgtgagcttgccaaccgcaggtatgtctcgatagggcggtcgttctactcgccggacataaggaagccgcagcggctcggcgatggcctacagtcatggtgtgggttctaccagagcatccggccgactcagatggggttgtcgcttaacattgatatgtcatctaccgcgttcatcgagccgctaccagtgatcgaattcgtggcccaaatactagggaaggatgtcatatcgaggccattgtcggatgcaaacagaatcaagatcaagaaagccttgcggggcgtgaaagttgaagtcactcaccggggaaatgtgaggcggaagtatcgcatttcagggctgacaacacaaccaactcatgaactgattttcccaatcgatgaccaaatgaacatgaaatctgtcgtagagtatttcaaggaaatgtatggcttcaccattcagcatccccatcttccctgccttcaggtgggaaaccaaaagaaggcaaactatctaccaatggaggcctgtaagattgttgagggtcagagatatacaaagaggttgaatgaaaagcagatcacatcattactcaaggttacttgccgtaggcctagagaacaggagatggatattctacagacagttcaacaaaatggatatgagcaagacccttatgcaaaagaatttggaatcaacattagtgagaagctaacctcagttgaagctcgggtccttcctgcaccttggctgaaatatcatgatactgggaaggaaaaggagtgcttgccacaagttggtcagtggaacatggtgaacaagaaagtgataaatgggtgcaaggtgaatcattgggcttgtataaatttctcaaggagtgtgcaagaaactactgctcggggattctgccaggagttggcacaaatgtgtcagatatccggcatggaattcaacagtgagcctgtgataccaatatactcagctagaccagatcaagtagagaaggcgcttaagcatgtgtataatatgtcattaaacaagctcaagggaaaagagcttgagcttcttttggccatcctccctgacaacaatggttctttatatggtgatataaaacgtatatgtgaaactgacttggggttgatatcacaatgttgcttaaccaaacatgttttcaagatcagcaagcagtacctggcaaatgtctcacttaaaatcaatgttaagatgggaggaagaaacaccgtgctgctggatgcaataagttggaggattcctttggtcagtgacataccaactattatatttggtgcagatgtcacgcatcctgaaaccggggaggactctagcccatccattgctgctgttgttgcatctcaagactggccagaagttacaaagtatgctggattggtgtgtgctcaggctcatcggcaagagctcattcaagatctttacaagacatggcatgatcctcaaagaggcaccgtaacaggaggcatgatcagggagctcttaatatccttcaggaaggccactgggcaaaagccattgagaataattttctacagggatggtgtcagtgaaggccaattctaccaagttctcctctatgagttggatgctatccgcaaggcatgtgcatctctagaaccaaattatcagcctcctgtaacattcgtggttgtccaaaagcgtcaccatacaagactcttcgcaaacaatcacaaagacagaagtagcacggacaaaagtggaaacattttgcctggaactgttgttgattcaaagatctgccacccatcagagtttgatttctacctctgtagccatgctggaattcagggaacaagtaggccagctcactaccacgtcctttgggatgagaacaatttcactgcagacgaaatgcagacattgacaaacaacctttgctacacttatgcacggtgcacacgctctgtttctgttgttccacctgcatactatgcgcatctggctgcgtttcgagcgcggttctacatggagccagagatgtcggagaaccagacgacgtcgaagagctccactgggacgaacggaacctcggtgaagccattgcctgcggtgaaggagaaggtgaagagggtgatgttctactgttgatgactgggagactacctttaactactcacatatgatgtacctaacattgtagaattttagtggtagggatttagaattagcttccttcaggaaagggagcagagcaagcatttggatcctgagcgacctcttttgaccactctgtaaagtactaagtaacgcatgtataatagttgttgtatcagtctgaaaaaaaggaagtgcactcagtgcttgtttttccagttctaggatgattttctcttcatggttaagatctggtaagagactc

SEQ ID NO: 882 - DNA, 3602 bp, Oryza sativa
  source 1..3602: mol_type = genomic DNA
gtcctcgaatccctctgctcactaccgtcgcgctcgcttatattgcgggagtcggcgacgaaaaccaccgagcacccgtcggcgcagcagcggcggagcgaagggaagggaagggaagccgcgatccagccgccgtcgactcgccgcccacgcagtcgccgccgagccccatctccgccactgctcgttgtgatatgcgccatgggtgtcaagactttacaggtatcagggtttgctctagatgacagtgctgattacgtcaaggatttgttggagcgaattgttggctgtgggaatgtgtatgcagtaaagctcaggcatccaaagaacgtcactgctacctcaagagcatatgctatagttcagtttcagaccgaggaacatgcttcacttgtaaaaaatgcggctcaaagaaagatactccgccgtgggcattattatctgaaagtccatccttcagatcgtgacattgttccaagaccaagagtttcaatgttcaagctagaggatgtaacactgcattttggttgcctgcttaaggaaacaattttatctgctctgtggagtcgaaaaggagtttctgttgagtttggtttcaatctgaaaaagatttacttttacctgcagctacccaacagctcaatcgaatataaacttgaactttcccatgagagcatatgggagatccagcttcaacgcccacccaagtcacaaacgaagtttcttttgatccaggttcaagctgcacctaagatttatgaacagacaccacgccgttctggtgttatgtacgaagatccattattcaactattttagggatcatacagatgatcaatggaccaggacaacggattttacttcatcttctagcattgggcaatcatatattttatgtcttgaggtaccacgtcgatgtgatctcccaaacattcgtgactacttcttttactatcatgagtacaatcatgacttcgagtgccggagtggggggtatccatattcaagtgatactcgctttgttccgattgtgaaatctcgtggttatgtcccctatgagatactcttcaagatcaaccatttggttcagaatgggacacttagcggaccgacagttgatgacagcttctttcgtctggtcagcccagcttttgtacctattgaccatataaagcgtgcacttgaaatgatgtcatatttgaaaaagacctgcttgaatccaacaagttggctatctgaacaatactcaaaattccggagatcacgctacgtccaaccatcacctaacatatctctggatgatggattggtttatgtctacagtgtatttttatggacctgagattaatgtctccaatcgtgtggtgcggaatttttcttctgacatagagaatttccttcgcatttcatttgttgacgaggactgcgagaagctccgtgcaactgatttatccccccgttctgcttcaggacatgatgcaaacagaactgctctgtataagagagttctgtcagtcctttcagatggcatcactattggtggcaagaactttgagtttcttgctttttcttcaagccagctccgagataactctgcatggatgtttgcttctcgccagggattagctgctagcgacattaggacatggatgggggatttccgtaacatcagaaatgtagcaaaatatgctgcaagacttggtcagtcttttagttcctcaaccgaaacattaaaggttcagaagtatgaggtggaagaaatctcagatataaaaaatggtacacagcatgtgttctctgatgggattggaaagatatcatctgcttttgctaatgaagtggccatgaagtgcaacctgaaacgctttgctccttctgcttttcaaataaggtatggtggttataaaggtgttgttgctgttgaccctacatcacgctggaagctttccttaagaaaaagcatgctaaagtttcagtcagacaatatcacagtagatgtccttgcatacagcaagtaccagccaggcttccttaatcggcagctaattactcttctttcgacacttggagttagagatagtgtctttgaacagaagcaagaagaagcagtgaatcagttgaacaaaatggttactgatcctcaagctgctatcgaagcaattgaacttatgcccatgggagaaataacaaatgcagttaaagagctgttgttgtgtggctaccagcctgatgatgaaccatatctttctatgctgctacaaacttttagggcatccaaattactagagctgaaaaccaagtcaaggatattaatcccaaaaggacgagcaatgatgggatgcttggatgaaacacgtacgctgaagtatgggcaagtgttcattcgagctacttcgggtgtaaatgacaatgacaggttcaccgtgacaggaaaagttgtgattgccaaaaacccttgcctccacccaggtgatatacggattctccatgctgttgatgttcctgttttgcaccacatgtttaactgtgtcgtctttccacagcaaggaccaaggccgcatcctaatgagtgttcagggagtgatcttgacggggacatatattttgtttcttgggacccatctctcattccgcctcgtatggtgacacctatggactatactccagcaccaacagaaacattagaccatgatgttacaattgaggaagtagaagagtacttcacaaattacatagtcaatgagagtttaggaatgattgccaatgcacatgtagtatttgcggataaggaagacctcaaggcagagagttcaccatgcattgagctggccaagctcttctccattgctgttgactttcccaaaactggagtgccagccctgattcctcctgaactacatgtgaaggagtatcctgatttcatggagaagcttgacaaagtcacctatgaatcaaaaggagtaatcgggaagctctacagggaaataaagaagcacacccctcacataaagcacttcacaagggaggtggcaaggcggtcttatgacaccgatatgattgttgatggctatgaagattacatcactgaagctatggcattgaaggacgagtacgacttcaaattgggtaatcttatggatcactatggaataaaaagtgaggccgagataataagtggatgcattcttaagatggcaaagaatttcacaaagaaaagcgatgctgatgctatcagattggcggtgagatctttgcgtaaggaagcaaggtcaaggttcagtgagatgagcttagatgataatgggcatggccatgatgcctccgaagccaaggcatccgcctggtaccatgtcacttaccaccctgaattctggggttgctacaatgaaggatatgagcgaccacactttatcagctttccatggtgtatctatgagaagcttttgcgcattaagcaaaggaggaagttcgtcaggaagatgcagcccgagttgttctctctccacaacttgagaatttgagtgtggccagcatgtttgctcttatacatatatctgaacttttgcattgaacatgtctattctggtgcttgaatgcttactg

SEQ ID NO: 883 - DNA, 9198 bp, Oryza sativa
  source 1..9198: mol_type = genomic DNA
tgcatacttactttcttgccaaattgagcgaggtgaactcgcttaatatcctccgccaacgcctaatgcatatagcctagttcccacccatatgtaactcccatccccatcattcccaccctctaaatgatgtactgcctaaccttattctattctcttcttatgccgtggcccccaagtcaattatcatatcctcgtattttcaatcacactatgacactcacttctactccctccccgtgtgatgccttctcttctttacaatgtcttggatagatctatacaaacatgatggatataataaatctatctaaatgattagagaaatatcgactcgtcataatatcagacctaatcgagaaagtcctaactaagctgatatgactctaaatagggatgaagttaaaaataaaaccaatatatcaaatagacaacgcttgcgccaacctgaatagaatatcagacttaaccgaaaaagttctagtcacgctgatacaagcaaagttgacagaacttacttccttgccggagatcaaaaccgatgcagcccaactcgaaattaagaactcgccagaataaaaggtgatggtgcaccgaaagtaattgtattgatatgtaaagatgtcttacatagtctctaggtgtacatatttatacctttgtattgatacaagtcgtgattggagaccacacatgtttcctaaagataaaagaaaagatacgagtcatccgatactagaagaaactttctaatctaaagataaaatataaaattactaaatcatgtctaattaataaataaaattaaaccgttatgtcgtggtcttcatgatttctttttgaacttggtctattctaaataagcttcgatctaccaattgagttctttgcttaaccgaatcaattagagaatcgtactaaattttgacatgggctgtgtttagttccttggccaaatatttttgaagtatacggacacacatttgaagtattaaacgttgtctaataacaaaacaaattaaagattccacctgtaaattgcgagacgaaatcattaagcctaattaatccatcattagcaaatgtttacttcaccatcacattgtcaaatcatggcgtaattatgctcaaaagattcatctcgcaatttacatacaaattgtgcaattatttttttcgtccacatttaatgcttcatgcgtgtgtccaaatattaggtgtgacgtttttggaaaaaaaaaagttgaatctaaacatggcccatggacataggccgtgtttagttccatttcaatttttttaagtatacggacacacatttaaaatattaaacgtaaactaataaaaaacaaattattccgatgaatctactcatcctaattaacccgtctttagcctaattaattcccaacggagcctttgttgtatttttattcctgagtaacgctgacacgtgggtcacagtcattagaaaacttttgagataaaaggcggagtagtagtcagtagtactcgagtatctccccattcctcctcgcgtaaaagaaaatctcccgtctcgtcgtctccgttccttgcgccatctcgcggctgaacaggggtcgcgagcagagcaggggatcctggtgagcatccgcatcctctttctgattcatctctctctctcccaccgggactacttttttctggaatttgcttgcgttcgtcaatcctagcttctcttctaaatcttggaagaagctcttctcttcttttcagcgccataaccttaatacaagtaacaatctgtttgttccccaaaaagtttgagggtttaactgaacccctatgtctcaagttggatccgctcctgtaacgtttcccccttaaaaattttttttgggggttcaactaaaccctaggtttattggtatctggtgagtagtatgtacttgcatgatatagatctatatatgtattggtttcttgcaaccagtttgtgaatacgctcttgtatccgcttcttgcaatatcccatctcttcccgtaacaatggtgcattcgccttcttgctcaaatatggggttttgtttcttttgtttttttttatccccaaatgtagttggttgtcgatgcttcttgtggggggcatgccttttaatctgtttggtttgatttaaaatttctccctgaagggtcaatgtgctgtgcttaagtttcttggttcaaaaggtcatggggggcatgccttttagtctgtttggtttgatttaaaatttctccctggagggtcaatatgctgtgcttaagtttcttggttcaaaaggtcatgtttttaactccactgttgtgtacaagttcttcagtttgctactcgatggagagttaatgtgctgagcttaggtttcttggtttataagttcgtctttttaattcacctattgtatacaatacaagaccttcaggttgctactccctggggggtttgaaccaagaaatgccgtacggcacattgacttttcaaggagtagaaagccgaagggttttcatacaatagttgaattaaaaagatgaacttttgaaacaagaaacctaaggacaacacaagttcttcagtttcttggttcaaaatagttccatccttttaattcaactatattgtatacatgcccttcaggttgctattagtactccctgaagggtcaatgtgctgttcttataggtttcttggttcaaaagttcgactttttaattcaactattgtataaaagcccttcagcttgctactctctgagaagtcaatgtgctgtactgcatttcttggataaaaaaaaatcgatagtttgtctttttaactcaaatgttgtatacaagctcttcagtttgctatgtcctggagggccaatttgccgtgcttaaggctcttggttcaaaagtttgtcttttaactcaaatgttgtatacaagcgcttcaagttggtctgatttgaaatttctttttgaaaagaagtgtgatttagaccataggctcccccttctcagctgataggcatgaaaacaacaatgaaaagaattcttgtggaggcctgcttttattccgattgctgtgattcaaatttatccctagagggttaaatggttaatgcgcttgcttagtttgtttggttcaaaagtcctttctttttaactcaagtgctgtatacaagcttttattctggtacgatttaaaatttcttttcagtaagtgtgatttagaccgaaggctaccccttttcagctgatacatgcattaaaacaacaaaagattaacttctcaaggcagtaatcactacaatacatgcaactaataacaatagggtggattcggttggagaatgagccaaactttcttaaaaaggaattgccgtaatacaggttttgcgcttaaaagcttttaatctgctgctgcaagcaattatatctggctggtttgttaatgattacaattgttttgttacctcccttttttatttattcagcaacaaaactttccgtattgatgcaactgtcattgcattattgaattcaacatgttgaatataatgtgtttatcacattgatgtcaattcctcaaaggggtaatctcccctattgtaacattgattaatccccctatttgcagctcatagaatggacgctcatgatggtgaggccgatgagttgccgccgcctcctcccgtacctgcaaatgtggtgcctattaaagctgatgacgttgagagcgaggtgccagcaaacaaaccagcaaaacctaagcggtttccaatggccaggcctggtttagggagaaaaggacagccaatccagctcttggcgaatcattacaaagtttctgtgaagagtagtgaagaatatttcttccactacaatgtaggtttctattctaatttattatcttatattcaatttatgggaattcataaccataatcaacatatgtacctggctgatttctagttctgtggtactttattaataggttattctgaagtatgaggatgatcgaccggttgatgggaaaggggtaggtcgaaaggtgattgataaactgcagcaaacctaccgttctgagctttcaagcaaggactttgcctatgatggtgaaaagagcctgtttacaattggtgctcttccacaagtaactaatgagttcacagtggtgttggaggatgtttcaactggaaagttagtttatccttgatttgtttttttgctgtttgtgctttcctaatattatgtttggtattatgtcttgtttaactatttcttgtttataggactgctgccaatggaagccctggaggtaatgacagccctggaggtagtgacaggaagagagttaggagaccataccagaccaagactttcaaagtggagctgtgctttgcagcaaagatccctatgaatgcaattgctcaggccataaaaggtcaagaatcagagaactcccaagaagctctcagagttcttgatataatattaaggcagcactctgctaaacagtatgtttctccacaagtgcattatccctgtgatttaaaagtgctctgctgtatttgggtttttgtatgctctataccaccgtgtcaaccacaagtgtatcacctcatgactgcattaattttttttcactatctacaggggctgccttttagtacgccagtcatttttccacaacaatcctaataactttgttgacctgggtggtggtgtgatgggctgtcgaggattccattcaagtttccgtggcacacagagtggactttctctgaatatcggtttgtattttgtcctgacatatcgttgtgcaattgcattgtttatcggtttgtattttgtcctgacatatcgttgtgcaattgcattgtttatttgtggtccttacataatcctatatttaagtaatcttcctgaattttcagatgtttcgacaactatgattgttaaacctggtcctgttatcgattttcttcttgccaaccagaaagttgatcaccctgacagaattgattggcaaaaggtgagctttttatttaatatcattgatgtttatgtgttagtaatcatccaaccatattggtacattcttacttggatgttttcttgctcaatacaggccaagcgtgctctcaagaacttgaggataagaaccacccctgtgaattcagaattcaagatcattggtttgagtgacagaaattgcaacgaacagatgtgagagcatattcttccttgctattttattcatctaaagcaattcttaaattaatattttggaaaaggcacccaattgttttgagcttgtattgcagtttttttcctaatcattctgctattatcgattgctttctgattggcatgcttgactaggttttcgttgaggcagaggaatgggaacaatggggatgttgatgaagttgaagttacagtctatgattactttgtgaaaaacaaaggcatagagctgcgctattctggcaatcttccttgcataaatgtggggaaaccaaagcgtccaacttattttccaatagaggtctgtttaatttttgctattctacatgtttaaaaaagtttactagaattatttattatttcaaactcctgttgtgaatattcttgtattaccagctatgctctcttattccactacaaagatacaccaaagctttgtcaacactgcaaaggtcctcccttgttgagaaatccagacagaagccccaggaaagaatgtcagtccttaatgatgtgagttactattcttgattctaacctgctacaatcatatagaaatggttggaattgtcaacatgactggtaagtgacgattcatgtttaccctaaatgcaaggcacttcgacatagtaattatgattctgatcccatgttgagggcatctggcatttcaattgcccaaaattttactcaagttgaaggaagggtcctgcaacccccaaaggttggtgaggattctctgaattcgtatgttttcacatgctccatgttctattcaacgtaccgcgtctaagtatatattgtatcatgtagctgaaagctggcaatggtgaagatatattcccacgcaatggtcggtggaacttcaacaataaggtcagaatgattttctttatcatatctttattcttggtatggaggaggtcgaggaacattctgatttctttcccttttttcagaaactgattcagacctgttctgtcgataagtgggcagtagttaatttctctgcacgctgtgatgtgcgaaatcttatccgggacctcataagaaatgcatctgcgaaggggattgtatgttttagctttttatcacatattttacgcctgatatttctttgcactgaactttgttaactttgcagcaaatggccgaaccttttgatgtgtttgaagagagcccctcattgaggcgagcacctgtatcaagaagagtagatgatatgtttgaacagataaaatcgaaacttcctggagctccgaaattcctcttgtgccttcttcctgagaggaaaaattgtgaagtttatggttcgtcattgtttccactccctaaagtcattcactcccttgcaaaatttacattgttttgtttcaaccaggtccttggaagaggaagtgtcttgctgaattcggtattgtcacacaatgccttgctccacaaagagtcaatgatcagtacctactcaatttgctattgaagataaatgccaaggtatttaacgtaaccttgtcttttcttactgcattatccatttatgtaagcttatggacttgctcttcccctgttactaaccagcttggtggaataaactcattgctgcaaattgaagcatccccttcaatacctcttgtatcgaagacacctaccatcatcttaggtatggatgtgtcacacggtcaaccaggacaatctgatagaccttccattgctgcggtaagagggatatacttttactctcataactccacacactgaactgttgtagctcatgtcatatgcatggatttctcaatttctaagttggggtgcttaattggttattgtatacctttggagttgtttaggtggttagctctcgccaatggcctctcatctctaaatacagagcatcggtgcacactcagtcacctaagctagaaatgatgtcttccttgtttaagccacgaggaactgaagatgatggcctcattcggtaagagatattatttgataaaccattgttgccaatgtatactatgattgctcacaagtatcctttctatagatgcttatctttgcatttgggatttttcagggaatcgctgattgacttctacactagttctggaaaacggaaaccggatcatgttatcgttttcaggtttcgagttcaaaaattgttgtctgtgaatctctctgaattctgtagtaatatcttagatgttcatttactcaaattgttaactgaagctgtcccagcaactgatgtaaatactttctattttttagggatggagttagtgaaagccagtttactcaggtcattaacattgagcttgatcagatcattgaggtgtgtgtttatttcattagccctcccatacctgctactgcacgtccaacttctgtactcaccaagtagtagctatgccctattgctcatttttctttaaatgtaacctattgcccatcgctttcattgttttgcttttaattgatgcagctcatcaagtagtaattatgcctaggactcatctgaaaaatatcacatattgtgcatcactgtttctttggcttttaatcaatgcaggcatgcaaatttctcgatgagaagtggtcaccaaagttcacagtgattgttgctcagaagaatcatcataccaaattttttcagtctggatctccagataatgttccgccaggtaactctttaggcagttttctctgatacctatgttatatcattttactgtgatgaaatcatggcgaggctaaagataaatggtaaacggccttctgtaggtactgttgtggacaaacaagtgtgccatccaaggaattatgacttctacatgtgtgctcatgctggaatgattgtaagctatctctggtttccacctgcagtgcacttattgtgagctcattgctttgtatgctctccgttgcttgtgtttataagatgtttgttgtttcagggaacgacgaggccaacacattatcatgttctgcacgatgagataggtttctcccctgatgatctgcaggagctagtgcactcactctcttatgtgtatgttgaaaactgcactggcatttcatccctgcgatctgttagctagttctgttctgatttgctgcctgtgtccatttcaggtatcagagaagcacaacagccatatcagttggtatgtagcttgtaaattgtaatgccatttctagttctcttcgggtaagatcactgtactgtcctgttggtgcctgaccttgcgcatttgtgtgcagttgctccgatttgctatgcccatcttgctgctgctcaggtgggcacattcctcaagttcgaagatatgtcggacgcgtcgtccagccaaggaggtcatacgtctgtcggaagtgtaccggtgcctgagctgcctcgcctccatgagaaagtgaggagctccatgtttttctgctgatcgtgccgcctctcgatcaaatgctcgccgacgttgagaaatccggtgatcggcctgggggaactactagtacttttgcttctcataattaggaacatgtatggaacctatgtacctgcccttggcatgctgcctgtgtcatggattatctgctggtaggagtatcctttaaccaaacccttttagcttttaagttaggtttaatggactgctgtttagtatgtggtgtggtgttagtaagtttccagacttcgacattgtgcagctatgcctattgctggttatggtcccttcccttctatgtagcatgtgccgtttccctttgtctgagttgattttagaaatagtatctgatctgttcgaggttggggatgaatgaccaaggaaatctttccttgtggttatcatgacatcattgatatcctcaggattactcatcatcagtttactgacgggtaaaatataactggcatggatgaaattatgacgattttcttcccacaac

SEQ ID NO: 884 - DNA, 9074 bp, Oryza sativa
  source 1..9074: mol_type = genomic DNA
aaatgatgtactgcctaaccttattctattctcttcttatgccgtggcccccaagtcaattatcatatcctcgtattttcaatcacactatgacactcacttctactccctccccgtgtgatgccttctcttctttacaatgtcttggatagatctatacaaacatgatggatataataaatctatctaaatgattagagaaatatcgactcgtcataatatcagacctaatcgagaaagtcctaactaagctgatatgactctaaatagggatgaagttaaaaataaaaccaatatatcaaatagacaacgcttgcgccaacctgaatagaatatcagacttaaccgaaaaagttctagtcacgctgatacaagcaaagttgacagaacttacttccttgccggagatcaaaaccgatgcagcccaactcgaaattaagaactcgccagaataaaaggtgatggtgcaccgaaagtaattgtattgatatgtaaagatgtcttacatagtctctaggtgtacatatttatacctttgtattgatacaagtcgtgattggagaccacacatgtttcctaaagataaaagaaaagatacgagtcatccgatactagaagaaactttctaatctaaagataaaatataaaattactaaatcatgtctaattaataaataaaattaaaccgttatgtcgtggtcttcatgatttctttttgaacttggtctattctaaataagcttcgatctaccaattgagttctttgcttaaccgaatcaattagagaatcgtactaaattttgacatgggctgtgtttagttccttggccaaatatttttgaagtatacggacacacatttgaagtattaaacgttgtctaataacaaaacaaattaaagattccacctgtaaattgcgagacgaaatcattaagcctaattaatccatcattagcaaatgtttacttcaccatcacattgtcaaatcatggcgtaattatgctcaaaagattcatctcgcaatttacatacaaattgtgcaattatttttttcgtccacatttaatgcttcatgcgtgtgtccaaatattaggtgtgacgtttttggaaaaaaaaaagttgaatctaaacatggcccatggacataggccgtgtttagttccatttcaatttttttaagtatacggacacacatttaaaatattaaacgtaaactaataaaaaacaaattattccgatgaatctactcatcctaattaacccgtctttagcctaattaattcccaacggagcctttgttgtatttttattcctgagtaacgctgacacgtgggtcacagtcattagaaaacttttgagataaaaggcggagtagtagtcagtagtactcgagtatctccccattcctcctcgcgtaaaagaaaatctcccgtctcgtcgtctccgttccttgcgccatctcgcggctgaacaggggtcgcgagcagagcaggggatcctggtgagcatccgcatcctctttctgattcatctctctctctcccaccgggactacttttttctggaatttgcttgcgttcgtcaatcctagcttctcttctaaatcttggaagaagctcttctcttcttttcagcgccataaccttaatacaagtaacaatctgtttgttccccaaaaagtttgagggtttaactgaacccctatgtctcaagttggatccgctcctgtaacgtttcccccttaaaaattttttttgggggttcaactaaaccctaggtttattggtatctggtgagtagtatgtacttgcatgatatagatctatatatgtattggtttcttgcaaccagtttgtgaatacgctcttgtatccgcttcttgcaatatcccatctcttcccgtaacaatggtgcattcgccttcttgctcaaatatggggttttgtttcttttgtttttttttatccccaaatgtagttggttgtcgatgcttcttgtggggggcatgccttttaatctgtttggtttgatttaaaatttctccctgaagggtcaatgtgctgtgcttaagtttcttggttcaaaaggtcatggggggcatgccttttagtctgtttggtttgatttaaaatttctccctggagggtcaatatgctgtgcttaagtttcttggttcaaaaggtcatgtttttaactccactgttgtgtacaagttcttcagtttgctactcgatggagagttaatgtgctgagcttaggtttcttggtttataagttcgtctttttaattcacctattgtatacaatacaagaccttcaggttgctactccctggggggtttgaaccaagaaatgccgtacggcacattgacttttcaaggagtagaaagccgaagggttttcatacaatagttgaattaaaaagatgaacttttgaaacaagaaacctaaggacaacacaagttcttcagtttcttggttcaaaatagttccatccttttaattcaactatattgtatacatgcccttcaggttgctattagtactccctgaagggtcaatgtgctgttcttataggtttcttggttcaaaagttcgactttttaattcaactattgtataaaagcccttcagcttgctactctctgagaagtcaatgtgctgtactgcatttcttggataaaaaaaaatcgatagtttgtctttttaactcaaatgttgtatacaagctcttcagtttgctatgtcctggagggccaatttgccgtgcttaaggctcttggttcaaaagtttgtcttttaactcaaatgttgtatacaagcgcttcaagttggtctgatttgaaatttctttttgaaaagaagtgtgatttagaccataggctcccccttctcagctgataggcatgaaaacaacaatgaaaagaattcttgtggaggcctgcttttattccgattgctgtgattcaaatttatccctagagggttaaatggttaatgcgcttgcttagtttgtttggttcaaaagtcctttctttttaactcaagtgctgtatacaagcttttattctggtacgatttaaaatttcttttcagtaagtgtgatttagaccgaaggctaccccttttcagctgatacatgcattaaaacaacaaaagattaacttctcaaggcagtaatcactacaatacatgcaactaataacaatagggtggattcggttggagaatgagccaaactttcttaaaaaggaattgccgtaatacaggttttgcgcttaaaagcttttaatctgctgctgcaagcaattatatctggctggtttgttaatgattacaattgttttgttacctcccttttttatttattcagcaacaaaactttccgtattgatgcaactgtcattgcattattgaattcaacatgttgaatataatgtgtttatcacattgatgtcaattcctcaaaggggtaatctcccctattgtaacattgattaatccccctatttgcagctcatagaatggacgctcatgatggtgaggccgatgagttgccgccgcctcctcccgtacctgcaaatgtggtgcctattaaagctgatgacgttgagagcgaggtgccagcaaacaaaccagcaaaacctaagcggtttccaatggccaggcctggtttagggagaaaaggacagccaatccagctcttggcgaatcattacaaagtttctgtgaagagtagtgaagaatatttcttccactacaatgtaggtttctattctaatttattatcttatattcaatttatgggaattcataaccataatcaacatatgtacctggctgatttctagttctgtggtactttattaataggttattctgaagtatgaggatgatcgaccggttgatgggaaaggggtaggtcgaaaggtgattgataaactgcagcaaacctaccgttctgagctttcaagcaaggactttgcctatgatggtgaaaagagcctgtttacaattggtgctcttccacaagtaactaatgagttcacagtggtgttggaggatgtttcaactggaaagttagtttatccttgatttgtttttttgctgtttgtgctttcctaatattatgtttggtattatgtcttgtttaactatttcttgtttataggactgctgccaatggaagccctggaggtaatgacagccctggaggtagtgacaggaagagagttaggagaccataccagaccaagactttcaaagtggagctgtgctttgcagcaaagatccctatgaatgcaattgctcaggccataaaaggtcaagaatcagagaactcccaagaagctctcagagttcttgatataatattaaggcagcactctgctaaacagtatgtttctccacaagtgcattatccctgtgatttaaaagtgctctgctgtatttgggtttttgtatgctctataccaccgtgtcaaccacaagtgtatcacctcatgactgcattaattttttttcactatctacaggggctgccttttagtacgccagtcatttttccacaacaatcctaataactttgttgacctgggtggtggtgtgatgggctgtcgaggattccattcaagtttccgtggcacacagagtggactttctctgaatatcggtttgtattttgtcctgacatatcgttgtgcaattgcattgtttatcggtttgtattttgtcctgacatatcgttgtgcaattgcattgtttatttgtggtccttacataatcctatatttaagtaatcttcctgaattttcagatgtttcgacaactatgattgttaaacctggtcctgttatcgattttcttcttgccaaccagaaagttgatcaccctgacagaattgattggcaaaaggtgagctttttatttaatatcattgatgtttatgtgttagtaatcatccaaccatattggtacattcttacttggatgttttcttgctcaatacaggccaagcgtgctctcaagaacttgaggataagaaccacccctgtgaattcagaattcaagatcattggtttgagtgacagaaattgcaacgaacagatgtgagagcatattcttccttgctattttattcatctaaagcaattcttaaattaatattttggaaaaggcacccaattgttttgagcttgtattgcagtttttttcctaatcattctgctattatcgattgctttctgattggcatgcttgactaggttttcgttgaggcagaggaatgggaacaatggggatgttgatgaagttgaagttacagtctatgattactttgtgaaaaacaaaggcatagagctgcgctattctggcaatcttccttgcataaatgtggggaaaccaaagcgtccaacttattttccaatagaggtctgtttaatttttgctattctacatgtttaaaaaagtttactagaattatttattatttcaaactcctgttgtgaatattcttgtattaccagctatgctctcttattccactacaaagatacaccaaagctttgtcaacactgcaaaggtcctcccttgttgagaaatccagacagaagccccaggaaagaatgtcagtccttaatgatgtgagttactattcttgattctaacctgctacaatcatatagaaatggttggaattgtcaacatgactggtaagtgacgattcatgtttaccctaaatgcaaggcacttcgacatagtaattatgattctgatcccatgttgagggcatctggcatttcaattgcccaaaattttactcaagttgaaggaagggtcctgcaacccccaaaggttggtgaggattctctgaattcgtatgttttcacatgctccatgttctattcaacgtaccgcgtctaagtatatattgtatcatgtagctgaaagctggcaatggtgaagatatattcccacgcaatggtcggtggaacttcaacaataaggtcagaatgattttctttatcatatctttattcttggtatggaggaggtcgaggaacattctgatttctttcccttttttcagaaactgattcagacctgttctgtcgataagtgggcagtagttaatttctctgcacgctgtgatgtgcgaaatcttatccgggacctcataagaaatgcatctgcgaaggggattgtatgttttagctttttatcacatattttacgcctgatatttctttgcactgaactttgttaactttgcagcaaatggccgaaccttttgatgtgtttgaagagagcccctcattgaggcgagcacctgtatcaagaagagtagatgatatgtttgaacagataaaatcgaaacttcctggagctccgaaattcctcttgtgccttcttcctgagaggaaaaattgtgaagtttatggttcgtcattgtttccactccctaaagtcattcactcccttgcaaaatttacattgttttgtttcaaccaggtccttggaagaggaagtgtcttgctgaattcggtattgtcacacaatgccttgctccacaaagagtcaatgatcagtacctactcaatttgctattgaagataaatgccaaggtatttaacgtaaccttgtcttttcttactgcattatccatttatgtaagcttatggacttgctcttcccctgttactaaccagcttggtggaataaactcattgctgcaaattgaagcatccccttcaatacctcttgtatcgaagacacctaccatcatcttaggtatggatgtgtcacacggtcaaccaggacaatctgatagaccttccattgctgcggtaagagggatatacttttactctcataactccacacactgaactgttgtagctcatgtcatatgcatggatttctcaatttctaagttggggtgcttaattggttattgtatacctttggagttgtttaggtggttagctctcgccaatggcctctcatctctaaatacagagcatcggtgcacactcagtcacctaagctagaaatgatgtcttccttgtttaagccacgaggaactgaagatgatggcctcattcggtaagagatattatttgataaaccattgttgccaatgtatactatgattgctcacaagtatcctttctatagatgcttatctttgcatttgggatttttcagggaatcgctgattgacttctacactagttctggaaaacggaaaccggatcatgttatcgttttcaggtttcgagttcaaaaattgttgtctgtgaatctctctgaattctgtagtaatatcttagatgttcatttactcaaattgttaactgaagctgtcccagcaactgatgtaaatactttctattttttagggatggagttagtgaaagccagtttactcaggtcattaacattgagcttgatcagatcattgaggtgtgtgtttatttcattagccctcccatacctgctactgcacgtccaacttctgtactcaccaagtagtagctatgccctattgctcatttttctttaaatgtaacctattgcccatcgctttcattgttttgcttttaattgatgcagctcatcaagtagtaattatgcctaggactcatctgaaaaatatcacatattgtgcatcactgtttctttggcttttaatcaatgcaggcatgcaaatttctcgatgagaagtggtcaccaaagttcacagtgattgttgctcagaagaatcatcataccaaattttttcagtctggatctccagataatgttccgccaggtaactctttaggcagttttctctgatacctatgttatatcattttactgtgatgaaatcatggcgaggctaaagataaatggtaaacggccttctgtaggtactgttgtggacaaacaagtgtgccatccaaggaattatgacttctacatgtgtgctcatgctggaatgattgtaagctatctctggtttccacctgcagtgcacttattgtgagctcattgctttgtatgctctccgttgcttgtgtttataagatgtttgttgtttcagggaacgacgaggccaacacattatcatgttctgcacgatgagataggtttctcccctgatgatctgcaggagctagtgcactcactctcttatgtgtatgttgaaaactgcactggcatttcatccctgcgatctgttagctagttctgttctgatttgctgcctgtgtccatttcaggtatcagagaagcacaacagccatatcagttggtatgtagcttgtaaattgtaatgccatttctagttctcttcgggtaagatcactgtactgtcctgttggtgcctgaccttgcgcatttgtgtgcagttgctccgatttgctatgcccatcttgctgctgctcaggtgggcacattcctcaagttcgaagatatgtcggacgcgtcgtccagccaaggaggtcatacgtctgtcggaagtgtaccggtgcctgagctgcctcgcctccatgagaaagtgaggagctccatgtttttctgctgatcgtgccgcctctcgatcaaatgctcgccgacgttgagaaatccggtgatcggcctgggggaactactagtacttttgcttctcataattaggaacatgtatggaacctatgtacctgcccttggcatgctgcctgtgtcatggattatctgctggtaggagtatcctttaaccaaacccttttagcttttaagttaggtttaatggactgctgtttagtatgtggtgtggtgttagtaagtttccagacttcgacattgtgcagctatgcctattgctggttatggtcccttcccttctatgtagcatgtgccgtttccctttgtctgagttgattttagaaatagtatctgatctgttcgaggttggggatgaatgaccaaggaaatctttccttgtggttatcatgacatcattgatatcctcaggattactcatcatcagtttactgacgggtaaaatataactggcatggatgaaattatgacgattttcttcccacaac

SEQ ID NO: 885 - DNA, 9106 bp, Oryza sativa
  source 1..9106: mol_type = genomic DNA
ccttccaaaagagtactcatatacaaaagtaaaaaaaaaaaatttagaacccaccccatctgcgcttccacttcatcctccaattattcaaatttaaaatccttccccattatacctctctttccacaaacacccccaaaactcaaacatggaatctgtaccaaaatcacagcctgaccagggtttgacttaccgccggtaactgcgcagttaccgcgggggtatggtaatataaataccgcggtaacctccttaaattcaaataaatttaaaaaataatttaaatttttgataatttttacacggtttcatacggtttttcatggttatcacgcggtaaccgtgcttaccgccggggcgtggtaactccggcccggcggtgtggaaaaccatgagcctgacacccaaccccccaaatgtggcaattgtaggacagtagcatggttggcaggtgtagggttggccaccattgaagaaggaaacgcaccggcccagctttcgcctcgccctctctcccccctcatcaaaaaatcctttgcgaaaaccaggccagacaacacgcagagatgcagccaccgctcgtactccctccacaccccgcgttgaatgcgccgcgtccaccgtgaaccgcggagacggctcggatgggagggccgcttgggacccacgtgtcggtgggatggtgtttggtaggctcggtccatgggccatggcccatgggcgcgggttccctcgctcgcgcgcgtgcggggcagccttttctggtggaggaagcgaagagaagagagccgagagggcgtggatgcccggggagtttaacggctcgggggacggcgtgaatatccgacggctgggattgcccgcgtggaggcgactcagccgtcggatcgttcgaagcttcggattcctcgccccctccccctccgtcggacttaacgccgtacgcagcggaggatgggtgggtgggctccaccgctccatacggcgaaagtgtcgttgtcacgtctaccgtgagcgcggaactaccctaggcgaaacgaactgctgtcacttacaggtgggcccagaccttcccccggggcccacggtgagcgagtacgtgtcgccgccgggataccatcggcaagctggaaagaaggctgactgttcggcatccacagccacacaggtcgatgacacgtggggccagaaaccctcgtggtccatacgtcagcgatgtcccagcagtaaagcggatggtttcggttgggtagtggaggagaacacgggggtagaggggggagagccccgggggtaaaagcgtcattccaactgggccgtcgtgcgcgcgggggccatctggcccgtccacgtgtcgccgcgcatccccgtgtgctcgcgggggacacgtgtacgttcccgatccacccccgtgccacggtggcgcgggtggcctcgacgaggtcctgcgaagtgccggttttacccttcgtcccctgccgctgcgtcttctcctcctacaagagagagagagagagtgtgtgtggagaggcgaggcgttcgagtttcgagaggagggaggggggacaaggaggaggagcgcaccaccctctcggagaggtcgcctccgttcttgcatcgttttctttggtaaggcgaggagtcccgcttttcattttgggtggagggaaatctagggttcttggcgggggggtttttgcagattggattgttgtgtatgcgggagcggttgggcttgtgttgtttggtgcggttcttggtggtggtggggtttttcggggaggagaggagggcggattccgtggggttttaccgtggaagtttctgttcttttgtgttcttttgcggttttcctctgttcttggtttaaagatcgctgcattttgatgcattctattaaggagtttgatttggggttttctttctttttttcccctgatttcgttcgttcttcgttgcgttgttctcggggctttttcgtcttttgccgtttatggtggtttgttttagatgttttttttgaagatttatccgaaacagtgtttgtgcgattctttttcatttttgcgttctttcttcgtttgatatttctggtccttgttgttttaaacctttattttttttgtttgggagcacctccttttgatgcttgttttggtggatatctgcctgtgtagttttgttagggtttaggggtttttgggaaggtttatgatactgatcttgactgggaaaagaagatttgctgattaagaaaatggctaagtttcttgtacttaaaaatgggtaggttgtgtttgttgtagttttgaaagtctgtaggctggatagactcttctcctatctttttggaagaaaaattaagaaaatagttttctaattttgcttttcttttctttttctggaggaaaaactcttgacccagagcattttcattgtctggtatctgttagcatgggttttagtttcctttccttttctgttttgatttaccttgttaattgttgaatgagttatgtattttgtgtgcaggatagggcagcgctttgacagctttggggagttagtcggtaagtgtactacgctcttaatttggctattaattaatgttttaatctttgtgagttgactaggaattttctatagttgtggtctcactctcagtagttatacatattttttttgcatgtactactagtttctcaggctttcttgttaatgttgcaatcgtctgacaaacgattagtgtctttgaatacattgttaaaaactggagtaccattttaatgtagatggcaaacaagaagcttagttgttttggcaccggttgaccctcgaagtagtagtaacctcaggtcattctcagtatgacagtgtatttaaagtgtactggcaaactcatgtaggtgtgataagagtttggacttgaacggtgacttgaaacgtttgttgtgtgttcttttgtgtgcatatgcaacatggcagactgactgacataacgtttgtgttagcatattactatattatgcttttagttgaatgttttaaaccttgtggtgtcataataattttcttgtattttacgatttcatttgcatgcaaaatatattagtgagacctaggggttttctgtatgattctagttttgaagattgatttaacttgttatattctagtctgagagaagtgtttatttagttggcttttatgctctatttcagagaagtgtgcacatggagtccaacagtggtgaaatcgaggagttgccacctcccccacctttgccaccaaatgctgagccaattaaaactgatgatacaaaaaagttatcaaaacctaagagggccttgatggctcgctctggttgtggcaaaaaagggcagccgatacagctgctgacgaaccacttcaaggtttcactgaaggcagcagacgaatttttccatcactactatgttcgtctctagcccttgtaacagttctttatttttcttctttgagttccttttgttcatgtctgattgccactactgcttgagttacacaggttaatctgaagtatgaggatgatagaccagtggatggaaagggcataggtagaaaggtgctggacaaactccagcagacctatgcgtctgagctggcaaataaagattttgcatacgatggtgagaagagcctgttcaccattggtgctcttcctcaagtgaacaatgagttcacggtagttctggaagacttcaacactggaaagtaattatctatctcaattctttctgctactttcaatgatgccaacattttttacttcaacattttttgctcacataacttccaatgctattaggtcatctgcaaatggtggcagccctggcaatgacagtccaggaaatgacaggaaaagggttagaaggccatatcagacaaaaacttttaaagttgagctgaactttgcagcaaaaattcctatgagcgccattgctcaggccttgagaggccaggaatctgaaaacacccaagaagcaattcgtgttattgatatcatattaagacagcattccgcaaaacagtatgtttccatatcttttggaagcccctactttgcaaatattctagctatattgtttagaatgtttaacatcatggctgatttgcatttgttcttaacttttcctttttttatgcaggggttgccttttggttcgccaatcctttttccataacaatccttcaaattttgttgacttgggtggtggtgtgatgggctgtaggggattccattcaagcttccgagctacacagagtggactttcactcaatatcggtaaacgattgctattatggccccaatttcatattttgtatgtggtcacatgcacgctgtagctgataatacatgtttgcatgttgctgctttaacttgtgcagatgtgtccacaacgatgattgtgaaacctggtcctgtggtagattttctacttgccaaccagaaggttgatcacccaaacaaaattgactgggcaaaggtattatgtcgtcatttcactgagtaaaacaataatttaagaatgaatgacaagaacaatgtgaaccctttgagatgactgaattgtattgttaacacaaatttgtaggccaagcgtgctctgaagaatttaaggataaaaacaagtccagcaaatactgaatacaagattgttggtttgagtgagagaaactgctatgaacaaatgtgagcttgttcatgtgttgtttttcttatattttatattgttgtgtgcctggatatttgacgtttttgcaattgcaactttggttttttatgtactttgagaaatagctttatttacttagctacacataattatctaggttcactttgaagcaaagaaatggtgatggtgaacctgaaggtgtggaagtatctgtttacgagtactttgtgaagaatcggggcatagagttgagatactctggtgattttccctgtatcaatgtggggaaaccaaaacggccaacttattttccaattgaggtaattgttttccttaatccaacataaatattttccaattaacatcctttgctgattgtggtgaatgttcctatgcttgctagctctgctctcttgtgcctttgcaaaggtataccaaggctttgagtacactacagaggtcttcgcttgttgagaagtccaggcagaaacctgaagaaaggatgtcagttttgtctgatgtgagttgctcctctgtcagcttaagagctgatgtacccctttcctgacagaataatcaaatcatcaatggtgaatttgcaggtgctgaaacgcagcaactatgattcagagcctatgttgaattcttgtggtatttcaattgctcgaggttttacacaagttgctggcagggtgctgcaggcccccaaggtcagtcagaactgtctatgctgcgttttttaattaaccctttgctgtgttctcttatttgtatatggtttagatcaattgtatgtttttctttggcagctaaaagctggaaatggtgaagatctttttgcacgtaatgggcggtggaactttaataataaggttagtgtctcagttctactcccactttactctttagacttccatgttgtgatacatattgtaacttctgttatatcttttttttacagaggctcattaaggctagcagtatcgagaaatgggcagttgttaacttctctgcacggtgtaatattagggatcttgtccgagacatcatcaagtgtggtggcatgaaaggaattgtaggtttttctgttttactcaaaatgttgcatatttcatcaaatgcaattccctcactttagtgttgcatgtttcatcaaatgcgattccctcacttaaaagactggctttgcagaaagtagaagatccatttgatgtcattgaggaggacccttcaatgcgacgagctcctgctgcaagaagggtagatggcatgattgacaagatgcaaaaaaagcttcctggacaaccaaagtttctgctctgtgttcttgctgagaggaagaattcagatatttatggtcagttacactaagattgtgctatgcctattcaaatatgcaacccttctatggcattcacatgttcttctctaatagggccctggaagcggaaatgtcttgctgaatttgggattattacacaatgtgtggcccctactagggtcaatgatcagtatattacaaatgtactgttaaagataaatgcaaaggtttgtggattttcacatccttccttctctcgcattgtaccattttatatctggtctggtcagcactaacatttttgcttgtttattaatcagcttggtggcttgaactccctgcttcaaattgaaacatccccttccattcctcttgtatccaaggtcccgacaataatattgggaatggatgtttcccatggatcacctggacagtctgatataccttcaattgctgcggtaagtaaacttttctaattttctgcactgtaccagaaacgaaaagctttactatacttaatcattagagcaagtttgatagtttagagcttagagagctaactacaagttaataagtataaacccatcttggctaatatttataatagattagctataaggttgccttttttctcctctctctcacttgtatatttaatacatctatcttggagcatgtggagaactagctctttcattagagccaacacataatttttctgtgtctttctccacataagcttatagtgggcttatagtccactattattcttgctcttaccggtccttaattcttaatcgttaacctttttttaggtcgttagttctcgtgaatggcctcttgtatcaaaatacagggcttcagtccgttctcagtcacctaagttagaaatgattgatggactatttaagccacaaggagctcaggaagatgatggcctcattcggtaagcaattttatttggaccgtgatgcaatccttataactttgtggcatgttccattgttcattaaattctcccagtgctaatgatatcttctgccatttgtgctggaaattatttcagggagttattagttgacttctataccagtactggtaaacgtaagcctgatcaagtcattatcttcaggtcagttactctttgaaagcttctcgtaaatgccattaataagcttcagtgaaatacctgaatgcaggattgtaaaagcaaaacttaaattatggacaatgattactttgtgctttgacttaactggttctttgtgtaaccgtttaatttttttcacttatttggtgctttaaatatagggatggggtcagtgagagccagtttacccaggtgctgaacattgagctggatcaaataattgaggtattgttcattataactttctgttctattgtttttagttcttttttattttgtatgcaagactgcaagtatcattactatcatcagctgcacaatcacttttgtatccttaaattgttgcaggcatgcaagtttcttgacgaaaactggtctccaaagtttacactgattgttgcacagaagaatcatcataccaaattttttgtgcctggatctcaaaataacgttcctcctggtaatcccattgttcgatatgttgtgtcaaaacttgcaattgtacatccttaatctaatatctaatgatttgaatgatgtaacttttaggtactgttgtggacaacgcagtctgtcatccaaggaacaatgacttctacatgtgtgcgcacgctggaatgattgtaagtatcgtcttggtgtattttatcggggttggctttaattgggtcacgtataatattccactttcaaggtcgattgtttaggcaagtctttcatattaaaattaagttattgatacatggcacttgtaggctgttgctttgttcaatccttgccctgagttttttatccttcaaaagtgatctagattgatacttaccatgatcccatcaggccaagctttgtactctttgtacataaatgtttgtacgtgtcattgatgaattgaatcagtaactattgacggttgatcaggaatgcattgctacagctggtaacctaactaatgtgcaacttctgatttatgttggatgaattaattcatttatcttgggtgctttatgcaacttgttttaattatgctataaaaccatcttggccagctgtagtattattatgtgaatttctttatagcctaatatcagaaatttctatagtttttttttgtgtgtgttctctgtatgaagtttcactccttttgccagtcccttttttttggtcctacttgaattgatggtggttgtgcctgtgctgtattagggaactacaaggcctacacattatcatatccttcatgatgagataggcttctctgctgacgatcttcaggagttggtccactccctttcctatgtgtaagtttgatatatgccatgattccttttttcacttcttggaaacagacttgttctgacatccaaatgcttgtttgtaccctttcagctaccagaggagcactacagccatatcagtcggtaagtgggcaatacctggtttagtgattgatgtttgcttcgaacttgcatgccagtgtttatttattcatctttatcttgtttccttgcagttgcacccatttgctacgcgcatctcgctgctgctcaggtcagccagttcatcaagttcgacgagatgtcggagacgtcgtcgagccatggtggccatacctcggcgggcagcgctccggtgcccgagctgcctcgcctgcataacaaagtcaggagctccatgttcttctgctgagcagccgcttggctgctatgttatggcctgaacttgtggatgttttggtagtcttgtttatgtcgtgtttgtttaagtaccagctggggggtggatgttattaggctggatgccgcacttctgaacctgttaggataactactgaacctgtccatcttaatcgcagcttgttccatgctctgctttgctgcccttatgggttgggttgccttttttcttttcgattttttgctg

SEQ ID NO: 886 - DNA, 9079 bp, Oryza sativa
  source 1..9079: mol_type = genomic DNA
agtaaaaaaaaaaaatttagaacccaccccatctgcgcttccacttcatcctccaattattcaaatttaaaatccttccccattatacctctctttccacaaacacccccaaaactcaaacatggaatctgtaccaaaatcacagcctgaccagggtttgacttaccgccggtaactgcgcagttaccgcgggggtatggtaatataaataccgcggtaacctccttaaattcaaataaatttaaaaaataatttaaatttttgataatttttacacggtttcatacggtttttcatggttatcacgcggtaaccgtgcttaccgccggggcgtggtaactccggcccggcggtgtggaaaaccatgagcctgacacccaaccccccaaatgtggcaattgtaggacagtagcatggttggcaggtgtagggttggccaccattgaagaaggaaacgcaccggcccagctttcgcctcgccctctctcccccctcatcaaaaaatcctttgcgaaaaccaggccagacaacacgcagagatgcagccaccgctcgtactccctccacaccccgcgttgaatgcgccgcgtccaccgtgaaccgcggagacggctcggatgggagggccgcttgggacccacgtgtcggtgggatggtgtttggtaggctcggtccatgggccatggcccatgggcgcgggttccctcgctcgcgcgcgtgcggggcagccttttctggtggaggaagcgaagagaagagagccgagagggcgtggatgcccggggagtttaacggctcgggggacggcgtgaatatccgacggctgggattgcccgcgtggaggcgactcagccgtcggatcgttcgaagcttcggattcctcgccccctccccctccgtcggacttaacgccgtacgcagcggaggatgggtgggtgggctccaccgctccatacggcgaaagtgtcgttgtcacgtctaccgtgagcgcggaactaccctaggcgaaacgaactgctgtcacttacaggtgggcccagaccttcccccggggcccacggtgagcgagtacgtgtcgccgccgggataccatcggcaagctggaaagaaggctgactgttcggcatccacagccacacaggtcgatgacacgtggggccagaaaccctcgtggtccatacgtcagcgatgtcccagcagtaaagcggatggtttcggttgggtagtggaggagaacacgggggtagaggggggagagccccgggggtaaaagcgtcattccaactgggccgtcgtgcgcgcgggggccatctggcccgtccacgtgtcgccgcgcatccccgtgtgctcgcgggggacacgtgtacgttcccgatccacccccgtgccacggtggcgcgggtggcctcgacgaggtcctgcgaagtgccggttttacccttcgtcccctgccgctgcgtcttctcctcctacaagagagagagagagagtgtgtgtggagaggcgaggcgttcgagtttcgagaggagggaggggggacaaggaggaggagcgcaccaccctctcggagaggtcgcctccgttcttgcatcgttttctttggtaaggcgaggagtcccgcttttcattttgggtggagggaaatctagggttcttggcgggggggtttttgcagattggattgttgtgtatgcgggagcggttgggcttgtgttgtttggtgcggttcttggtggtggtggggtttttcggggaggagaggagggcggattccgtggggttttaccgtggaagtttctgttcttttgtgttcttttgcggttttcctctgttcttggtttaaagatcgctgcattttgatgcattctattaaggagtttgatttggggttttctttctttttttcccctgatttcgttcgttcttcgttgcgttgttctcggggctttttcgtcttttgccgtttatggtggtttgttttagatgttttttttgaagatttatccgaaacagtgtttgtgcgattctttttcatttttgcgttctttcttcgtttgatatttctggtccttgttgttttaaacctttattttttttgtttgggagcacctccttttgatgcttgttttggtggatatctgcctgtgtagttttgttagggtttaggggtttttgggaaggtttatgatactgatcttgactgggaaaagaagatttgctgattaagaaaatggctaagtttcttgtacttaaaaatgggtaggttgtgtttgttgtagttttgaaagtctgtaggctggatagactcttctcctatctttttggaagaaaaattaagaaaatagttttctaattttgcttttcttttctttttctggaggaaaaactcttgacccagagcattttcattgtctggtatctgttagcatgggttttagtttcctttccttttctgttttgatttaccttgttaattgttgaatgagttatgtattttgtgtgcaggatagggcagcgctttgacagctttggggagttagtcggtaagtgtactacgctcttaatttggctattaattaatgttttaatctttgtgagttgactaggaattttctatagttgtggtctcactctcagtagttatacatattttttttgcatgtactactagtttctcaggctttcttgttaatgttgcaatcgtctgacaaacgattagtgtctttgaatacattgttaaaaactggagtaccattttaatgtagatggcaaacaagaagcttagttgttttggcaccggttgaccctcgaagtagtagtaacctcaggtcattctcagtatgacagtgtatttaaagtgtactggcaaactcatgtaggtgtgataagagtttggacttgaacggtgacttgaaacgtttgttgtgtgttcttttgtgtgcatatgcaacatggcagactgactgacataacgtttgtgttagcatattactatattatgcttttagttgaatgttttaaaccttgtggtgtcataataattttcttgtattttacgatttcatttgcatgcaaaatatattagtgagacctaggggttttctgtatgattctagttttgaagattgatttaacttgttatattctagtctgagagaagtgtttatttagttggcttttatgctctatttcagagaagtgtgcacatggagtccaacagtggtgaaatcgaggagttgccacctcccccacctttgccaccaaatgctgagccaattaaaactgatgatacaaaaaagttatcaaaacctaagagggccttgatggctcgctctggttgtggcaaaaaagggcagccgatacagctgctgacgaaccacttcaaggtttcactgaaggcagcagacgaatttttccatcactactatgttcgtctctagcccttgtaacagttctttatttttcttctttgagttccttttgttcatgtctgattgccactactgcttgagttacacaggttaatctgaagtatgaggatgatagaccagtggatggaaagggcataggtagaaaggtgctggacaaactccagcagacctatgcgtctgagctggcaaataaagattttgcatacgatggtgagaagagcctgttcaccattggtgctcttcctcaagtgaacaatgagttcacggtagttctggaagacttcaacactggaaagtaattatctatctcaattctttctgctactttcaatgatgccaacattttttacttcaacattttttgctcacataacttccaatgctattaggtcatctgcaaatggtggcagccctggcaatgacagtccaggaaatgacaggaaaagggttagaaggccatatcagacaaaaacttttaaagttgagctgaactttgcagcaaaaattcctatgagcgccattgctcaggccttgagaggccaggaatctgaaaacacccaagaagcaattcgtgttattgatatcatattaagacagcattccgcaaaacagtatgtttccatatcttttggaagcccctactttgcaaatattctagctatattgtttagaatgtttaacatcatggctgatttgcatttgttcttaacttttcctttttttatgcaggggttgccttttggttcgccaatcctttttccataacaatccttcaaattttgttgacttgggtggtggtgtgatgggctgtaggggattccattcaagcttccgagctacacagagtggactttcactcaatatcggtaaacgattgctattatggccccaatttcatattttgtatgtggtcacatgcacgctgtagctgataatacatgtttgcatgttgctgctttaacttgtgcagatgtgtccacaacgatgattgtgaaacctggtcctgtggtagattttctacttgccaaccagaaggttgatcacccaaacaaaattgactgggcaaaggtattatgtcgtcatttcactgagtaaaacaataatttaagaatgaatgacaagaacaatgtgaaccctttgagatgactgaattgtattgttaacacaaatttgtaggccaagcgtgctctgaagaatttaaggataaaaacaagtccagcaaatactgaatacaagattgttggtttgagtgagagaaactgctatgaacaaatgtgagcttgttcatgtgttgtttttcttatattttatattgttgtgtgcctggatatttgacgtttttgcaattgcaactttggttttttatgtactttgagaaatagctttatttacttagctacacataattatctaggttcactttgaagcaaagaaatggtgatggtgaacctgaaggtgtggaagtatctgtttacgagtactttgtgaagaatcggggcatagagttgagatactctggtgattttccctgtatcaatgtggggaaaccaaaacggccaacttattttccaattgaggtaattgttttccttaatccaacataaatattttccaattaacatcctttgctgattgtggtgaatgttcctatgcttgctagctctgctctcttgtgcctttgcaaaggtataccaaggctttgagtacactacagaggtcttcgcttgttgagaagtccaggcagaaacctgaagaaaggatgtcagttttgtctgatgtgagttgctcctctgtcagcttaagagctgatgtacccctttcctgacagaataatcaaatcatcaatggtgaatttgcaggtgctgaaacgcagcaactatgattcagagcctatgttgaattcttgtggtatttcaattgctcgaggttttacacaagttgctggcagggtgctgcaggcccccaaggtcagtcagaactgtctatgctgcgttttttaattaaccctttgctgtgttctcttatttgtatatggtttagatcaattgtatgtttttctttggcagctaaaagctggaaatggtgaagatctttttgcacgtaatgggcggtggaactttaataataaggttagtgtctcagttctactcccactttactctttagacttccatgttgtgatacatattgtaacttctgttatatcttttttttacagaggctcattaaggctagcagtatcgagaaatgggcagttgttaacttctctgcacggtgtaatattagggatcttgtccgagacatcatcaagtgtggtggcatgaaaggaattgtaggtttttctgttttactcaaaatgttgcatatttcatcaaatgcaattccctcactttagtgttgcatgtttcatcaaatgcgattccctcacttaaaagactggctttgcagaaagtagaagatccatttgatgtcattgaggaggacccttcaatgcgacgagctcctgctgcaagaagggtagatggcatgattgacaagatgcaaaaaaagcttcctggacaaccaaagtttctgctctgtgttcttgctgagaggaagaattcagatatttatggtcagttacactaagattgtgctatgcctattcaaatatgcaacccttctatggcattcacatgttcttctctaatagggccctggaagcggaaatgtcttgctgaatttgggattattacacaatgtgtggcccctactagggtcaatgatcagtatattacaaatgtactgttaaagataaatgcaaaggtttgtggattttcacatccttccttctctcgcattgtaccattttatatctggtctggtcagcactaacatttttgcttgtttattaatcagcttggtggcttgaactccctgcttcaaattgaaacatccccttccattcctcttgtatccaaggtcccgacaataatattgggaatggatgtttcccatggatcacctggacagtctgatataccttcaattgctgcggtaagtaaacttttctaattttctgcactgtaccagaaacgaaaagctttactatacttaatcattagagcaagtttgatagtttagagcttagagagctaactacaagttaataagtataaacccatcttggctaatatttataatagattagctataaggttgccttttttctcctctctctcacttgtatatttaatacatctatcttggagcatgtggagaactagctctttcattagagccaacacataatttttctgtgtctttctccacataagcttatagtgggcttatagtccactattattcttgctcttaccggtccttaattcttaatcgttaacctttttttaggtcgttagttctcgtgaatggcctcttgtatcaaaatacagggcttcagtccgttctcagtcacctaagttagaaatgattgatggactatttaagccacaaggagctcaggaagatgatggcctcattcggtaagcaattttatttggaccgtgatgcaatccttataactttgtggcatgttccattgttcattaaattctcccagtgctaatgatatcttctgccatttgtgctggaaattatttcagggagttattagttgacttctataccagtactggtaaacgtaagcctgatcaagtcattatcttcaggtcagttactctttgaaagcttctcgtaaatgccattaataagcttcagtgaaatacctgaatgcaggattgtaaaagcaaaacttaaattatggacaatgattactttgtgctttgacttaactggttctttgtgtaaccgtttaatttttttcacttatttggtgctttaaatatagggatggggtcagtgagagccagtttacccaggtgctgaacattgagctggatcaaataattgaggtattgttcattataactttctgttctattgtttttagttcttttttattttgtatgcaagactgcaagtatcattactatcatcagctgcacaatcacttttgtatccttaaattgttgcaggcatgcaagtttcttgacgaaaactggtctccaaagtttacactgattgttgcacagaagaatcatcataccaaattttttgtgcctggatctcaaaataacgttcctcctggtaatcccattgttcgatatgttgtgtcaaaacttgcaattgtacatccttaatctaatatctaatgatttgaatgatgtaacttttaggtactgttgtggacaacgcagtctgtcatccaaggaacaatgacttctacatgtgtgcgcacgctggaatgattgtaagtatcgtcttggtgtattttatcggggttggctttaattgggtcacgtataatattccactttcaaggtcgattgtttaggcaagtctttcatattaaaattaagttattgatacatggcacttgtaggctgttgctttgttcaatccttgccctgagttttttatccttcaaaagtgatctagattgatacttaccatgatcccatcaggccaagctttgtactctttgtacataaatgtttgtacgtgtcattgatgaattgaatcagtaactattgacggttgatcaggaatgcattgctacagctggtaacctaactaatgtgcaacttctgatttatgttggatgaattaattcatttatcttgggtgctttatgcaacttgttttaattatgctataaaaccatcttggccagctgtagtattattatgtgaatttctttatagcctaatatcagaaatttctatagtttttttttgtgtgtgttctctgtatgaagtttcactccttttgccagtcccttttttttggtcctacttgaattgatggtggttgtgcctgtgctgtattagggaactacaaggcctacacattatcatatccttcatgatgagataggcttctctgctgacgatcttcaggagttggtccactccctttcctatgtgtaagtttgatatatgccatgattccttttttcacttcttggaaacagacttgttctgacatccaaatgcttgtttgtaccctttcagctaccagaggagcactacagccatatcagtcggtaagtgggcaatacctggtttagtgattgatgtttgcttcgaacttgcatgccagtgtttatttattcatctttatcttgtttccttgcagttgcacccatttgctacgcgcatctcgctgctgctcaggtcagccagttcatcaagttcgacgagatgtcggagacgtcgtcgagccatggtggccatacctcggcgggcagcgctccggtgcccgagctgcctcgcctgcataacaaagtcaggagctccatgttcttctgctgagcagccgcttggctgctatgttatggcctgaacttgtggatgttttggtagtcttgtttatgtcgtgtttgtttaagtaccagctggggggtggatgttattaggctggatgccgcacttctgaacctgttaggataactactgaacctgtccatcttaatcgcagcttgttccatgctctgctttgctgcccttatgggttgggttgccttttttcttttcgattttttgctg

SEQ ID NO: 887 - DNA, 9074 bp, Oryza sativa
  source 1..9074: mol_type = genomic DNA
aaaaaaaaaatttagaacccaccccatctgcgcttccacttcatcctccaattattcaaatttaaaatccttccccattatacctctctttccacaaacacccccaaaactcaaacatggaatctgtaccaaaatcacagcctgaccagggtttgacttaccgccggtaactgcgcagttaccgcgggggtatggtaatataaataccgcggtaacctccttaaattcaaataaatttaaaaaataatttaaatttttgataatttttacacggtttcatacggtttttcatggttatcacgcggtaaccgtgcttaccgccggggcgtggtaactccggcccggcggtgtggaaaaccatgagcctgacacccaaccccccaaatgtggcaattgtaggacagtagcatggttggcaggtgtagggttggccaccattgaagaaggaaacgcaccggcccagctttcgcctcgccctctctcccccctcatcaaaaaatcctttgcgaaaaccaggccagacaacacgcagagatgcagccaccgctcgtactccctccacaccccgcgttgaatgcgccgcgtccaccgtgaaccgcggagacggctcggatgggagggccgcttgggacccacgtgtcggtgggatggtgtttggtaggctcggtccatgggccatggcccatgggcgcgggttccctcgctcgcgcgcgtgcggggcagccttttctggtggaggaagcgaagagaagagagccgagagggcgtggatgcccggggagtttaacggctcgggggacggcgtgaatatccgacggctgggattgcccgcgtggaggcgactcagccgtcggatcgttcgaagcttcggattcctcgccccctccccctccgtcggacttaacgccgtacgcagcggaggatgggtgggtgggctccaccgctccatacggcgaaagtgtcgttgtcacgtctaccgtgagcgcggaactaccctaggcgaaacgaactgctgtcacttacaggtgggcccagaccttcccccggggcccacggtgagcgagtacgtgtcgccgccgggataccatcggcaagctggaaagaaggctgactgttcggcatccacagccacacaggtcgatgacacgtggggccagaaaccctcgtggtccatacgtcagcgatgtcccagcagtaaagcggatggtttcggttgggtagtggaggagaacacgggggtagaggggggagagccccgggggtaaaagcgtcattccaactgggccgtcgtgcgcgcgggggccatctggcccgtccacgtgtcgccgcgcatccccgtgtgctcgcgggggacacgtgtacgttcccgatccacccccgtgccacggtggcgcgggtggcctcgacgaggtcctgcgaagtgccggttttacccttcgtcccctgccgctgcgtcttctcctcctacaagagagagagagagagtgtgtgtggagaggcgaggcgttcgagtttcgagaggagggaggggggacaaggaggaggagcgcaccaccctctcggagaggtcgcctccgttcttgcatcgttttctttggtaaggcgaggagtcccgcttttcattttgggtggagggaaatctagggttcttggcgggggggtttttgcagattggattgttgtgtatgcgggagcggttgggcttgtgttgtttggtgcggttcttggtggtggtggggtttttcggggaggagaggagggcggattccgtggggttttaccgtggaagtttctgttcttttgtgttcttttgcggttttcctctgttcttggtttaaagatcgctgcattttgatgcattctattaaggagtttgatttggggttttctttctttttttcccctgatttcgttcgttcttcgttgcgttgttctcggggctttttcgtcttttgccgtttatggtggtttgttttagatgttttttttgaagatttatccgaaacagtgtttgtgcgattctttttcatttttgcgttctttcttcgtttgatatttctggtccttgttgttttaaacctttattttttttgtttgggagcacctccttttgatgcttgttttggtggatatctgcctgtgtagttttgttagggtttaggggtttttgggaaggtttatgatactgatcttgactgggaaaagaagatttgctgattaagaaaatggctaagtttcttgtacttaaaaatgggtaggttgtgtttgttgtagttttgaaagtctgtaggctggatagactcttctcctatctttttggaagaaaaattaagaaaatagttttctaattttgcttttcttttctttttctggaggaaaaactcttgacccagagcattttcattgtctggtatctgttagcatgggttttagtttcctttccttttctgttttgatttaccttgttaattgttgaatgagttatgtattttgtgtgcaggatagggcagcgctttgacagctttggggagttagtcggtaagtgtactacgctcttaatttggctattaattaatgttttaatctttgtgagttgactaggaattttctatagttgtggtctcactctcagtagttatacatattttttttgcatgtactactagtttctcaggctttcttgttaatgttgcaatcgtctgacaaacgattagtgtctttgaatacattgttaaaaactggagtaccattttaatgtagatggcaaacaagaagcttagttgttttggcaccggttgaccctcgaagtagtagtaacctcaggtcattctcagtatgacagtgtatttaaagtgtactggcaaactcatgtaggtgtgataagagtttggacttgaacggtgacttgaaacgtttgttgtgtgttcttttgtgtgcatatgcaacatggcagactgactgacataacgtttgtgttagcatattactatattatgcttttagttgaatgttttaaaccttgtggtgtcataataattttcttgtattttacgatttcatttgcatgcaaaatatattagtgagacctaggggttttctgtatgattctagttttgaagattgatttaacttgttatattctagtctgagagaagtgtttatttagttggcttttatgctctatttcagagaagtgtgcacatggagtccaacagtggtgaaatcgaggagttgccacctcccccacctttgccaccaaatgctgagccaattaaaactgatgatacaaaaaagttatcaaaacctaagagggccttgatggctcgctctggttgtggcaaaaaagggcagccgatacagctgctgacgaaccacttcaaggtttcactgaaggcagcagacgaatttttccatcactactatgttcgtctctagcccttgtaacagttctttatttttcttctttgagttccttttgttcatgtctgattgccactactgcttgagttacacaggttaatctgaagtatgaggatgatagaccagtggatggaaagggcataggtagaaaggtgctggacaaactccagcagacctatgcgtctgagctggcaaataaagattttgcatacgatggtgagaagagcctgttcaccattggtgctcttcctcaagtgaacaatgagttcacggtagttctggaagacttcaacactggaaagtaattatctatctcaattctttctgctactttcaatgatgccaacattttttacttcaacattttttgctcacataacttccaatgctattaggtcatctgcaaatggtggcagccctggcaatgacagtccaggaaatgacaggaaaagggttagaaggccatatcagacaaaaacttttaaagttgagctgaactttgcagcaaaaattcctatgagcgccattgctcaggccttgagaggccaggaatctgaaaacacccaagaagcaattcgtgttattgatatcatattaagacagcattccgcaaaacagtatgtttccatatcttttggaagcccctactttgcaaatattctagctatattgtttagaatgtttaacatcatggctgatttgcatttgttcttaacttttcctttttttatgcaggggttgccttttggttcgccaatcctttttccataacaatccttcaaattttgttgacttgggtggtggtgtgatgggctgtaggggattccattcaagcttccgagctacacagagtggactttcactcaatatcggtaaacgattgctattatggccccaatttcatattttgtatgtggtcacatgcacgctgtagctgataatacatgtttgcatgttgctgctttaacttgtgcagatgtgtccacaacgatgattgtgaaacctggtcctgtggtagattttctacttgccaaccagaaggttgatcacccaaacaaaattgactgggcaaaggtattatgtcgtcatttcactgagtaaaacaataatttaagaatgaatgacaagaacaatgtgaaccctttgagatgactgaattgtattgttaacacaaatttgtaggccaagcgtgctctgaagaatttaaggataaaaacaagtccagcaaatactgaatacaagattgttggtttgagtgagagaaactgctatgaacaaatgtgagcttgttcatgtgttgtttttcttatattttatattgttgtgtgcctggatatttgacgtttttgcaattgcaactttggttttttatgtactttgagaaatagctttatttacttagctacacataattatctaggttcactttgaagcaaagaaatggtgatggtgaacctgaaggtgtggaagtatctgtttacgagtactttgtgaagaatcggggcatagagttgagatactctggtgattttccctgtatcaatgtggggaaaccaaaacggccaacttattttccaattgaggtaattgttttccttaatccaacataaatattttccaattaacatcctttgctgattgtggtgaatgttcctatgcttgctagctctgctctcttgtgcctttgcaaaggtataccaaggctttgagtacactacagaggtcttcgcttgttgagaagtccaggcagaaacctgaagaaaggatgtcagttttgtctgatgtgagttgctcctctgtcagcttaagagctgatgtacccctttcctgacagaataatcaaatcatcaatggtgaatttgcaggtgctgaaacgcagcaactatgattcagagcctatgttgaattcttgtggtatttcaattgctcgaggttttacacaagttgctggcagggtgctgcaggcccccaaggtcagtcagaactgtctatgctgcgttttttaattaaccctttgctgtgttctcttatttgtatatggtttagatcaattgtatgtttttctttggcagctaaaagctggaaatggtgaagatctttttgcacgtaatgggcggtggaactttaataataaggttagtgtctcagttctactcccactttactctttagacttccatgttgtgatacatattgtaacttctgttatatcttttttttacagaggctcattaaggctagcagtatcgagaaatgggcagttgttaacttctctgcacggtgtaatattagggatcttgtccgagacatcatcaagtgtggtggcatgaaaggaattgtaggtttttctgttttactcaaaatgttgcatatttcatcaaatgcaattccctcactttagtgttgcatgtttcatcaaatgcgattccctcacttaaaagactggctttgcagaaagtagaagatccatttgatgtcattgaggaggacccttcaatgcgacgagctcctgctgcaagaagggtagatggcatgattgacaagatgcaaaaaaagcttcctggacaaccaaagtttctgctctgtgttcttgctgagaggaagaattcagatatttatggtcagttacactaagattgtgctatgcctattcaaatatgcaacccttctatggcattcacatgttcttctctaatagggccctggaagcggaaatgtcttgctgaatttgggattattacacaatgtgtggcccctactagggtcaatgatcagtatattacaaatgtactgttaaagataaatgcaaaggtttgtggattttcacatccttccttctctcgcattgtaccattttatatctggtctggtcagcactaacatttttgcttgtttattaatcagcttggtggcttgaactccctgcttcaaattgaaacatccccttccattcctcttgtatccaaggtcccgacaataatattgggaatggatgtttcccatggatcacctggacagtctgatataccttcaattgctgcggtaagtaaacttttctaattttctgcactgtaccagaaacgaaaagctttactatacttaatcattagagcaagtttgatagtttagagcttagagagctaactacaagttaataagtataaacccatcttggctaatatttataatagattagctataaggttgccttttttctcctctctctcacttgtatatttaatacatctatcttggagcatgtggagaactagctctttcattagagccaacacataatttttctgtgtctttctccacataagcttatagtgggcttatagtccactattattcttgctcttaccggtccttaattcttaatcgttaacctttttttaggtcgttagttctcgtgaatggcctcttgtatcaaaatacagggcttcagtccgttctcagtcacctaagttagaaatgattgatggactatttaagccacaaggagctcaggaagatgatggcctcattcggtaagcaattttatttggaccgtgatgcaatccttataactttgtggcatgttccattgttcattaaattctcccagtgctaatgatatcttctgccatttgtgctggaaattatttcagggagttattagttgacttctataccagtactggtaaacgtaagcctgatcaagtcattatcttcaggtcagttactctttgaaagcttctcgtaaatgccattaataagcttcagtgaaatacctgaatgcaggattgtaaaagcaaaacttaaattatggacaatgattactttgtgctttgacttaactggttctttgtgtaaccgtttaatttttttcacttatttggtgctttaaatatagggatggggtcagtgagagccagtttacccaggtgctgaacattgagctggatcaaataattgaggtattgttcattataactttctgttctattgtttttagttcttttttattttgtatgcaagactgcaagtatcattactatcatcagctgcacaatcacttttgtatccttaaattgttgcaggcatgcaagtttcttgacgaaaactggtctccaaagtttacactgattgttgcacagaagaatcatcataccaaattttttgtgcctggatctcaaaataacgttcctcctggtaatcccattgttcgatatgttgtgtcaaaacttgcaattgtacatccttaatctaatatctaatgatttgaatgatgtaacttttaggtactgttgtggacaacgcagtctgtcatccaaggaacaatgacttctacatgtgtgcgcacgctggaatgattgtaagtatcgtcttggtgtattttatcggggttggctttaattgggtcacgtataatattccactttcaaggtcgattgtttaggcaagtctttcatattaaaattaagttattgatacatggcacttgtaggctgttgctttgttcaatccttgccctgagttttttatccttcaaaagtgatctagattgatacttaccatgatcccatcaggccaagctttgtactctttgtacataaatgtttgtacgtgtcattgatgaattgaatcagtaactattgacggttgatcaggaatgcattgctacagctggtaacctaactaatgtgcaacttctgatttatgttggatgaattaattcatttatcttgggtgctttatgcaacttgttttaattatgctataaaaccatcttggccagctgtagtattattatgtgaatttctttatagcctaatatcagaaatttctatagtttttttttgtgtgtgttctctgtatgaagtttcactccttttgccagtcccttttttttggtcctacttgaattgatggtggttgtgcctgtgctgtattagggaactacaaggcctacacattatcatatccttcatgatgagataggcttctctgctgacgatcttcaggagttggtccactccctttcctatgtgtaagtttgatatatgccatgattccttttttcacttcttggaaacagacttgttctgacatccaaatgcttgtttgtaccctttcagctaccagaggagcactacagccatatcagtcggtaagtgggcaatacctggtttagtgattgatgtttgcttcgaacttgcatgccagtgtttatttattcatctttatcttgtttccttgcagttgcacccatttgctacgcgcatctcgctgctgctcaggtcagccagttcatcaagttcgacgagatgtcggagacgtcgtcgagccatggtggccatacctcggcgggcagcgctccggtgcccgagctgcctcgcctgcataacaaagtcaggagctccatgttcttctgctgagcagccgcttggctgctatgttatggcctgaacttgtggatgttttggtagtcttgtttatgtcgtgtttgtttaagtaccagctggggggtggatgttattaggctggatgccgcacttctgaacctgttaggataactactgaacctgtccatcttaatcgcagcttgttccatgctctgctttgctgcccttatgggttgggttgccttttttcttttcgattttttgctg

SEQ ID NO: 888 - DNA, 9088 bp, Oryza sativa
  source 1..9088: mol_type = genomic DNA
atatacaaaagtaaaaaaaaaaaatttagaacccaccccatctgcgcttccacttcatcctccaattattcaaatttaaaatccttccccattatacctctctttccacaaacacccccaaaactcaaacatggaatctgtaccaaaatcacagcctgaccagggtttgacttaccgccggtaactgcgcagttaccgcgggggtatggtaatataaataccgcggtaacctccttaaattcaaataaatttaaaaaataatttaaatttttgataatttttacacggtttcatacggtttttcatggttatcacgcggtaaccgtgcttaccgccggggcgtggtaactccggcccggcggtgtggaaaaccatgagcctgacacccaaccccccaaatgtggcaattgtaggacagtagcatggttggcaggtgtagggttggccaccattgaagaaggaaacgcaccggcccagctttcgcctcgccctctctcccccctcatcaaaaaatcctttgcgaaaaccaggccagacaacacgcagagatgcagccaccgctcgtactccctccacaccccgcgttgaatgcgccgcgtccaccgtgaaccgcggagacggctcggatgggagggccgcttgggacccacgtgtcggtgggatggtgtttggtaggctcggtccatgggccatggcccatgggcgcgggttccctcgctcgcgcgcgtgcggggcagccttttctggtggaggaagcgaagagaagagagccgagagggcgtggatgcccggggagtttaacggctcgggggacggcgtgaatatccgacggctgggattgcccgcgtggaggcgactcagccgtcggatcgttcgaagcttcggattcctcgccccctccccctccgtcggacttaacgccgtacgcagcggaggatgggtgggtgggctccaccgctccatacggcgaaagtgtcgttgtcacgtctaccgtgagcgcggaactaccctaggcgaaacgaactgctgtcacttacaggtgggcccagaccttcccccggggcccacggtgagcgagtacgtgtcgccgccgggataccatcggcaagctggaaagaaggctgactgttcggcatccacagccacacaggtcgatgacacgtggggccagaaaccctcgtggtccatacgtcagcgatgtcccagcagtaaagcggatggtttcggttgggtagtggaggagaacacgggggtagaggggggagagccccgggggtaaaagcgtcattccaactgggccgtcgtgcgcgcgggggccatctggcccgtccacgtgtcgccgcgcatccccgtgtgctcgcgggggacacgtgtacgttcccgatccacccccgtgccacggtggcgcgggtggcctcgacgaggtcctgcgaagtgccggttttacccttcgtcccctgccgctgcgtcttctcctcctacaagagagagagagagagtgtgtgtggagaggcgaggcgttcgagtttcgagaggagggaggggggacaaggaggaggagcgcaccaccctctcggagaggtcgcctccgttcttgcatcgttttctttggtaaggcgaggagtcccgcttttcattttgggtggagggaaatctagggttcttggcgggggggtttttgcagattggattgttgtgtatgcgggagcggttgggcttgtgttgtttggtgcggttcttggtggtggtggggtttttcggggaggagaggagggcggattccgtggggttttaccgtggaagtttctgttcttttgtgttcttttgcggttttcctctgttcttggtttaaagatcgctgcattttgatgcattctattaaggagtttgatttggggttttctttctttttttcccctgatttcgttcgttcttcgttgcgttgttctcggggctttttcgtcttttgccgtttatggtggtttgttttagatgttttttttgaagatttatccgaaacagtgtttgtgcgattctttttcatttttgcgttctttcttcgtttgatatttctggtccttgttgttttaaacctttattttttttgtttgggagcacctccttttgatgcttgttttggtggatatctgcctgtgtagttttgttagggtttaggggtttttgggaaggtttatgatactgatcttgactgggaaaagaagatttgctgattaagaaaatggctaagtttcttgtacttaaaaatgggtaggttgtgtttgttgtagttttgaaagtctgtaggctggatagactcttctcctatctttttggaagaaaaattaagaaaatagttttctaattttgcttttcttttctttttctggaggaaaaactcttgacccagagcattttcattgtctggtatctgttagcatgggttttagtttcctttccttttctgttttgatttaccttgttaattgttgaatgagttatgtattttgtgtgcaggatagggcagcgctttgacagctttggggagttagtcggtaagtgtactacgctcttaatttggctattaattaatgttttaatctttgtgagttgactaggaattttctatagttgtggtctcactctcagtagttatacatattttttttgcatgtactactagtttctcaggctttcttgttaatgttgcaatcgtctgacaaacgattagtgtctttgaatacattgttaaaaactggagtaccattttaatgtagatggcaaacaagaagcttagttgttttggcaccggttgaccctcgaagtagtagtaacctcaggtcattctcagtatgacagtgtatttaaagtgtactggcaaactcatgtaggtgtgataagagtttggacttgaacggtgacttgaaacgtttgttgtgtgttcttttgtgtgcatatgcaacatggcagactgactgacataacgtttgtgttagcatattactatattatgcttttagttgaatgttttaaaccttgtggtgtcataataattttcttgtattttacgatttcatttgcatgcaaaatatattagtgagacctaggggttttctgtatgattctagttttgaagattgatttaacttgttatattctagtctgagagaagtgtttatttagttggcttttatgctctatttcagagaagtgtgcacatggagtccaacagtggtgaaatcgaggagttgccacctcccccacctttgccaccaaatgctgagccaattaaaactgatgatacaaaaaagttatcaaaacctaagagggccttgatggctcgctctggttgtggcaaaaaagggcagccgatacagctgctgacgaaccacttcaaggtttcactgaaggcagcagacgaatttttccatcactactatgttcgtctctagcccttgtaacagttctttatttttcttctttgagttccttttgttcatgtctgattgccactactgcttgagttacacaggttaatctgaagtatgaggatgatagaccagtggatggaaagggcataggtagaaaggtgctggacaaactccagcagacctatgcgtctgagctggcaaataaagattttgcatacgatggtgagaagagcctgttcaccattggtgctcttcctcaagtgaacaatgagttcacggtagttctggaagacttcaacactggaaagtaattatctatctcaattctttctgctactttcaatgatgccaacattttttacttcaacattttttgctcacataacttccaatgctattaggtcatctgcaaatggtggcagccctggcaatgacagtccaggaaatgacaggaaaagggttagaaggccatatcagacaaaaacttttaaagttgagctgaactttgcagcaaaaattcctatgagcgccattgctcaggccttgagaggccaggaatctgaaaacacccaagaagcaattcgtgttattgatatcatattaagacagcattccgcaaaacagtatgtttccatatcttttggaagcccctactttgcaaatattctagctatattgtttagaatgtttaacatcatggctgatttgcatttgttcttaacttttcctttttttatgcaggggttgccttttggttcgccaatcctttttccataacaatccttcaaattttgttgacttgggtggtggtgtgatgggctgtaggggattccattcaagcttccgagctacacagagtggactttcactcaatatcggtaaacgattgctattatggccccaatttcatattttgtatgtggtcacatgcacgctgtagctgataatacatgtttgcatgttgctgctttaacttgtgcagatgtgtccacaacgatgattgtgaaacctggtcctgtggtagattttctacttgccaaccagaaggttgatcacccaaacaaaattgactgggcaaaggtattatgtcgtcatttcactgagtaaaacaataatttaagaatgaatgacaagaacaatgtgaaccctttgagatgactgaattgtattgttaacacaaatttgtaggccaagcgtgctctgaagaatttaaggataaaaacaagtccagcaaatactgaatacaagattgttggtttgagtgagagaaactgctatgaacaaatgtgagcttgttcatgtgttgtttttcttatattttatattgttgtgtgcctggatatttgacgtttttgcaattgcaactttggttttttatgtactttgagaaatagctttatttacttagctacacataattatctaggttcactttgaagcaaagaaatggtgatggtgaacctgaaggtgtggaagtatctgtttacgagtactttgtgaagaatcggggcatagagttgagatactctggtgattttccctgtatcaatgtggggaaaccaaaacggccaacttattttccaattgaggtaattgttttccttaatccaacataaatattttccaattaacatcctttgctgattgtggtgaatgttcctatgcttgctagctctgctctcttgtgcctttgcaaaggtataccaaggctttgagtacactacagaggtcttcgcttgttgagaagtccaggcagaaacctgaagaaaggatgtcagttttgtctgatgtgagttgctcctctgtcagcttaagagctgatgtacccctttcctgacagaataatcaaatcatcaatggtgaatttgcaggtgctgaaacgcagcaactatgattcagagcctatgttgaattcttgtggtatttcaattgctcgaggttttacacaagttgctggcagggtgctgcaggcccccaaggtcagtcagaactgtctatgctgcgttttttaattaaccctttgctgtgttctcttatttgtatatggtttagatcaattgtatgtttttctttggcagctaaaagctggaaatggtgaagatctttttgcacgtaatgggcggtggaactttaataataaggttagtgtctcagttctactcccactttactctttagacttccatgttgtgatacatattgtaacttctgttatatcttttttttacagaggctcattaaggctagcagtatcgagaaatgggcagttgttaacttctctgcacggtgtaatattagggatcttgtccgagacatcatcaagtgtggtggcatgaaaggaattgtaggtttttctgttttactcaaaatgttgcatatttcatcaaatgcaattccctcactttagtgttgcatgtttcatcaaatgcgattccctcacttaaaagactggctttgcagaaagtagaagatccatttgatgtcattgaggaggacccttcaatgcgacgagctcctgctgcaagaagggtagatggcatgattgacaagatgcaaaaaaagcttcctggacaaccaaagtttctgctctgtgttcttgctgagaggaagaattcagatatttatggtcagttacactaagattgtgctatgcctattcaaatatgcaacccttctatggcattcacatgttcttctctaatagggccctggaagcggaaatgtcttgctgaatttgggattattacacaatgtgtggcccctactagggtcaatgatcagtatattacaaatgtactgttaaagataaatgcaaaggtttgtggattttcacatccttccttctctcgcattgtaccattttatatctggtctggtcagcactaacatttttgcttgtttattaatcagcttggtggcttgaactccctgcttcaaattgaaacatccccttccattcctcttgtatccaaggtcccgacaataatattgggaatggatgtttcccatggatcacctggacagtctgatataccttcaattgctgcggtaagtaaacttttctaattttctgcactgtaccagaaacgaaaagctttactatacttaatcattagagcaagtttgatagtttagagcttagagagctaactacaagttaataagtataaacccatcttggctaatatttataatagattagctataaggttgccttttttctcctctctctcacttgtatatttaatacatctatcttggagcatgtggagaactagctctttcattagagccaacacataatttttctgtgtctttctccacataagcttatagtgggcttatagtccactattattcttgctcttaccggtccttaattcttaatcgttaacctttttttaggtcgttagttctcgtgaatggcctcttgtatcaaaatacagggcttcagtccgttctcagtcacctaagttagaaatgattgatggactatttaagccacaaggagctcaggaagatgatggcctcattcggtaagcaattttatttggaccgtgatgcaatccttataactttgtggcatgttccattgttcattaaattctcccagtgctaatgatatcttctgccatttgtgctggaaattatttcagggagttattagttgacttctataccagtactggtaaacgtaagcctgatcaagtcattatcttcaggtcagttactctttgaaagcttctcgtaaatgccattaataagcttcagtgaaatacctgaatgcaggattgtaaaagcaaaacttaaattatggacaatgattactttgtgctttgacttaactggttctttgtgtaaccgtttaatttttttcacttatttggtgctttaaatatagggatggggtcagtgagagccagtttacccaggtgctgaacattgagctggatcaaataattgaggtattgttcattataactttctgttctattgtttttagttcttttttattttgtatgcaagactgcaagtatcattactatcatcagctgcacaatcacttttgtatccttaaattgttgcaggcatgcaagtttcttgacgaaaactggtctccaaagtttacactgattgttgcacagaagaatcatcataccaaattttttgtgcctggatctcaaaataacgttcctcctggtaatcccattgttcgatatgttgtgtcaaaacttgcaattgtacatccttaatctaatatctaatgatttgaatgatgtaacttttaggtactgttgtggacaacgcagtctgtcatccaaggaacaatgacttctacatgtgtgcgcacgctggaatgattgtaagtatcgtcttggtgtattttatcggggttggctttaattgggtcacgtataatattccactttcaaggtcgattgtttaggcaagtctttcatattaaaattaagttattgatacatggcacttgtaggctgttgctttgttcaatccttgccctgagttttttatccttcaaaagtgatctagattgatacttaccatgatcccatcaggccaagctttgtactctttgtacataaatgtttgtacgtgtcattgatgaattgaatcagtaactattgacggttgatcaggaatgcattgctacagctggtaacctaactaatgtgcaacttctgatttatgttggatgaattaattcatttatcttgggtgctttatgcaacttgttttaattatgctataaaaccatcttggccagctgtagtattattatgtgaatttctttatagcctaatatcagaaatttctatagtttttttttgtgtgtgttctctgtatgaagtttcactccttttgccagtcccttttttttggtcctacttgaattgatggtggttgtgcctgtgctgtattagggaactacaaggcctacacattatcatatccttcatgatgagataggcttctctgctgacgatcttcaggagttggtccactccctttcctatgtgtaagtttgatatatgccatgattccttttttcacttcttggaaacagacttgttctgacatccaaatgcttgtttgtaccctttcagctaccagaggagcactacagccatatcagtcggtaagtgggcaatacctggtttagtgattgatgtttgcttcgaacttgcatgccagtgtttatttattcatctttatcttgtttccttgcagttgcacccatttgctacgcgcatctcgctgctgctcaggtcagccagttcatcaagttcgacgagatgtcggagacgtcgtcgagccatggtggccatacctcggcgggcagcgctccggtgcccgagctgcctcgcctgcataacaaagtcaggagctccatgttcttctgctgagcagccgcttggctgctatgttatggcctgaacttgtggatgttttggtagtcttgtttatgtcgtgtttgtttaagtaccagctggggggtggatgttattaggctggatgccgcacttctgaacctgttaggataactactgaacctgtccatcttaatcgcagcttgttccatgctctgctttgctgcccttatgggttgggttgccttttttcttttcgattttttgctg

SEQ ID NO: 889 - DNA, 9133 bp, Oryza sativa
  source 1..9133: mol_type = genomic DNA
acaaagttaatatttacatagatttttcatgtatattgtaatgcaaaaattatccttgtcagggaccatgaaagaaatactagtacttttctgactggaatagggttttatcggatatcggtggtacgcctttcatcaacgattgcatatctggacttattgcatagtacaatactttttttttggggtcaaatatatgcattaccctaaaaagatcctacaatatccaaatgtacatcctacagtatgatttgttttttcttttctttttttggttgaccacaagtttgcctccacagaagtgtgtattaaggtttataaactttttaaatggaagtgtactgaagcaattcatgtagttaagtaagttttacttcaacctgagcttaatcctgttcatcagtgatttcacacctttactgatgcagattccccatgaaagtacgaaatggaagcagtgaaggtgaaaccgttgaaattactgtccaggaatattttaagtccaagcaggtggatttaacaatgccttatttgccatgtcttgatgtgggaaaaccaaaacgcccaaattatgttccaattgaggttgctggcaccaatcctgtttgcctattcatttcatactatggctggtaagtctactttctgaatgtgcttgatgtccaattttttatgtgtctttcgggctgcagctgtgccatatggtatcacttcaaagatatacaaaggcgctttcttctcaacaaagagcaaccttggttgaaaaatcacgtcagaaacctcaagagcgcatgcgagttgttactgatgtgggtttactgaattctgtcaataccactgtatgttccagttttaacctttgagttactaacatacacttttcaggctgtaaaaaacaatagatatgatgatgatccaatcttatcttcttgtggaattaaaattgagaaacaactcactcgtgtcgatggtcgtgttctgtctgcaccaacggttaggcctcatccatttatccttttttctcctttcatatgcgactcatgttctctgattattttgatttgttaatccagctagtcgtggggaatagtgaagattgcattccaaacagaggcagatggaactacaataacaaggtggttaggctacttgtaatggtacacattgctatcaaaaacattccgtcctgaacttttttcatttggccactgttacagaggctatttgagcctgtcaagattgagcgttgggcaattgttaatttctctgctcggtgtgacatgagccggatctcaagagacctgataaactgtggacgaactaaaggcattgtaagtttttgtgttcctttttttatattgcagtaaatcctatgtagcctaacttgtaatgatgtgctttgacaatgtaatttatccctttcttcttgcatagattattgaacgccctttcaccttggtagatgaggatagccaatctaggagatgtactcctgttgtaagggttgaaagcatgtttgaaaaagtgaaagcaaaccttcctggtcctcctgaatttttgctgtgtgttttaccagaaaggaaaaattgtgatctctatggtaatagcctaataggttacacattacttatttctgccctcatgaattcttcaatattcgtaccatctcatcaatctgttttgtagggccatggaagaagaaaaaccttcatgagatgggtattattactcaatgcattgttcctagtgttaagatgaatgatcagtactataccaatgttcttctgaaaatcaatgctaaggtacaggcacttcatctctatttgattgtgccttaaactttgatccaacaatcttgttcacatgaattactttcttatctaaaatttttattcctgtttattagcttggtggaatgaactccaagctttcattggagcatcgacatatgattcccattgtcaatcaaacacccacattaattttgggaatggatgtttcacatggttcgccaggtcgagctgatgtaccatcaattgctgcggtatgtcttattccctctgcattattttgcatgcaccaaatatctgtgttgtgtttccatccttgagtggtcctacattcagttgcctagtatagatgcagggctgtactagaaaattaggaggcatatgtgccaaaattgtcatgtgctaaaattttgagctattgcatggtaactacagcttaattatgccacagaatccagtgaacattctccaattaaagccaatagttacaattcataattcatgaggacaccaggaaaaaaaattatgttacaaacaggacctttgtttgtaagaaaacatcaaatatagtctgaaaaaatgctgctattacacaagatgcatcactgttgagtataatgaaaccatgaaatgccttaggagttttaaaaaaataagatgatatttgagatcaatgtaaaattactgatgctcgacatagaactcctgccaagttaatctgatcttagttcacaagttatagtaactgagaaacacttcataactatacttcaaatcctccataatatagaactagaggtggatgttccattgatacttttcctgcatgttgtgtgggtaagtggaatgataaaatggtaaacatgatgtgaaaggtggatggtaacttcgtagctagaaagtttgattttgtgtgatctgtacaaatttgcatcttacatcattcatccaaacagtgaaaataattgagatgatgtttccttccttagggtagttggggatttgtcccatcacctactgtctttttattcagttaaagaacttgttgcctgtgtgccatatggtttaggccggggatgtaatacatttccataattccattatctaagtacatacaagaagaaaaatgatttgcaccttagatcaatcatccaaatgctaaaagttattgagaagatgccgctttttcattgacatgaggcaacacttcatctgtcccaaaatataagcatttttagcattgtaacaagtcaaatatttttaactttgactattaatagcaaaaaaaattaaaaggatcaatcatgtaaaattgatgttactagatttttattaaacaaactatcataatatgcaactctttttatttaaaacatctcacttttatagatattgttggtcaaaatagcatctcggagactatgtcagagtccaaaaatgattatattttgggactgaggaagtaggatatggggccctcaatcttgttagggccctttgtggcagcagagcttgcacatcgctcattcagctagtggtgatgacatcatattttgctacaggttgttgggtccagatgttggccgctgatatcacgctacagagcatctgtccggacccagtctccaaaggtagagatgattgattctctttttaagccactggacgatggaaaagatgatggcataataaggtgctctaaactaatcgtcctactctgtattgtttctgcttaataccttatgttattttaggcgtactgttgtaaaaagttattcactcaggaagtagtctactagtctgagcctaagatgcctatttacaaaaatgttctttttttctactgtaactttgctttgcagggaacttctactggacttctacaagaccagtcaacaaagaaagccgaagcagataatcattttcaggtctttatcagtttattgttatctacttattactttcagttttgcatatgttggatattcgtggcacgcttttcaaattgctaaacggtgcatttcatgtgaaaactttctatatggaagtttctctaaaataccagataaatatatttttcaagtttgtaataattaaaactcaattaatcatacgttaatacctcctcgttttacggaaaacacttaatcttcatctacatgagtttcaaacaccacaaatctgatctatgatctatatgcacttcaaatttttttatcacacacttgatgcttatgttgatgcctttaaggaccgtttaattctcaaagaattttccttggatggatttttcattctacaaaagaaaatgttggcagttgaaagttagtttctataagcaaatttactttgctagtttgtgaaaagaaagagtgatggctaaagggagatgcatgctcaacaaggctttttgccaattctagattatacaatatatcaagatgatgggtcgaaccagcatttatcacagatttttattccacccttacatagtttattatggaaattgtacgttgtcaacgattgaaggaaatgctcatcatagctgttaacaatcagctagttaatgttatatggtatgtgttgttatagccacgtttacttgtttaatattgtcactctaaatcttctgtaaactcttaagatatattttatcaagtactcccttcgtcccaaaatataacttttaacaatgcaaaatttatcccaaaatataacatctaacattcaaaatttatctcaaatataacaacttcacttacattctcttatcaaccaatcacaaccttccacgattcaaattctccacctatttactcttaaccaaccacaactttcccccattatacccatgtacaaccctaaaactccttatattttgggacagagatagtaagttttttccatagctgcatttgttcaaagacaaatttcctgtttttgttattgataacaggaggggctggtccaaatattttgtaggtcttatagcaaatagtacattagtctttttgtctttaatgcataatggatatagagagcttttcatttgaatactggtttctgtacattccaacgttgtgtcattacacatatttaaatatgaattatataatttgcatatgtttgcaaaactacaatctgcatatgttggggaaatatccattgaaaaccatacctaaatgttctctatattcatgaaaaaattactagacataggtatagggatgaaatacattcacaccaaatctcaagtctaaactccggtattttttttcatgaatttatgtcgaacttttaggtccggttttcacgagttttcacttgatggttttcaccagatatgccatgcatatgtttgcaaaactataaacgtaattttaatgttaattggggtacacaatatggtgggcaaagtgttcttagaaagaactgaaaaaataaactatgcatgacatgttttaaatagggaaaatttgctctaggaaattacagttgatgtatttgctgaaacgtgctgcaaatacatcattggccttttctgcagaaatggctatcacaatgttgtagccatttctgctgtacttcattggcctttgctccaattgagcatgacaacaaaaaaaaggaaaaagtacatgtgaggtccctcatcttatcaccgaattacaaaattgtccctcaaccgaaaaaccagatatatgatatcccttatcttacaaaaccaggtcagtttatgtcctttggcggtattgactccggttttatcctatgtagtaactgagtcagcatgggcccacatgggcccaaacatgtcagggacacctccgtttcttctcctttgcccctctcccctctcttcccgatctctttccattgtgcgagacctccggagaaagcggcatgtgcggcagccggcggagaaagtggcgtgggtagcagagaaagcggcgccggcggagaggagttgggcgacagcggcgagaagctcctccacctcccaccgcagccaggatccctcctccacgccttcctcctctgcaagcgatggcgcggccacggcttcctccgtcgcttcctcgactgccgcgtgcggtgcgcagtcgcggctgccctacgcagcaccagcggactccgcccgagctcctccaacgtcgtggcctccgcatgcgccacggtggcccgcaaggccatggccacccagcatgcatgcaaagaagttcagtagcctgcctgatgctgcagctactatgaaaggggggtgatttcgcatgcgtacccaaacgagctatcttagcttactcactagaggtgctcaactcaactaatcagcaactagttcaaatcgatctactactgatccgtcagtgatcagtcgtcgtcaacatctattgatgcaaagcagctggctatctatcaatctggaatgcagagattaattgaattcaaccatccgtccatgaatgatcggttctcgtcgtcatcagtgggtaccgattaattgggctcttgctccgaatgggtgatgcactaggtctgcacggagagcagcgcgtgcggcagccggcggagagagcggcgtgggcggccgccggcacggagcaaccggcgcgggcagcgaataaagtgatgccggcgaagaggagttgggcggcagcggcgagaagctcctttgcctctacgtgtggtggtcagcggagaaattggcgggggcgacgagaagctcctttgcctctacgtgtggcgtgcggcagccagcggagagagcggcgcgggcggccgccggcatggagcaagcggcgcgggcagcgaagaaagtggtgccggcgaagaggagttgggcggcagcggcgagaagctcctttgcctctacgtgtggcggtcggcggagaaattggcaggggcgatggccgacacggagaaagtggcatgcagctgcggcgtgagtggagcgggcacgccgctgccgttgctatcgtccacgacctgaaccctgcgggtaccaggaggaagagcgggtggaggtgccggggtagttggttggcctcgcgctcctcgctgatgctcatcgccgccaacacctggcctttgtcgcccgccgggggaaggcagcgtatgatgggtatggaggtggccgcggactcatgggagaggacggggtcactgagcaagtgggagctggaggagcggagtgagacgtggagcttgtcggccgccggccgccccgtcgtctgtgtccgtggtgtcggggagtgcggcgctgctgccactcctcgtcaagattgacgggagtgagggggattggcgcgtggcgccacttcggcctggagctggggtgctgacatgttgggcccatgtgggtcccatgctgactcagctatcacgtcggatgaaactggagtcaaccagaatcaatattgcctaaggacttaaagtgatccggttttataagttgagggacgttatatatctgtttttttctttgtttggggatgattttgtgattcggtgaaaatatgagcgacctcagatgcattttttccacaaaaaaaatcgcttcatgatagacaaaaaaatatatgggccagataaccaatgcaagcaaaaagcaggagtccaacagcactttaaaagagtccatgaggaatttggaaataacaaactcctgttggcctattctggtatgttgtcatatttttccaatacctgttaatacttagtaattttatgaacgtttggacccagacagcttgaaccttactgctttcaagattctgtacatcagtttgtaattatgtgaacgtatggacttcgacacaaaaaacaactcatgcatgtaataattcccttgatatgcaaaactccaagcttaatttttcagtgttttagatgcaaggtttcttttgatcatttccttatgtggtctatatgtgcagggatggtgtgagcgagtctcaatttagccaagtactgaatgttgagcttaatcaaattataaaggtcatgctgtatcatttatttagtttagatttttttttttttttgtaaatctttttaacaggaatttcgcaatgcaggcatatcaatatatggatcaggggccaattcctaagttcacagtgatcattgctcaaaagaatcaccacacaaaacttttccaagaaaatactccagacaacgttcctccaggtgcagttctgtcctgttttaatacatctgatctgagggctatttatttacccccaataggttttgatgaagcactgtctttgcgaacagggactgttgtagattctggtattgttcatccaagacagtatgatttctacatgtatgctcatgctggacctatagtaagtcttcttgagccaatattttggaaatgattctgctgacatgtgatatttggggccatacattttcgtgctatatgtatgatggcattctgaaaattgtaaaatgtttgcctctttcagggtacctcaaggcccacccattaccatgtcttgctcgatgagattggtttcttgcccgatgacgtgcagaaactagttttgtcgctttcttatgtgtaagtacaggatagtttcctactttattcttgaatacacaaatcagaaagatgataatttgtgtggttgttttattgctctccctttctttgtgatcgtgcaggtatcagaggagcaccactgcaatatctgttggtatgttgatattcctagtcgcaatttgcttccttctgcattccggaacattatacctgcaatctgatcaatgctgttttctcttctcccagtggcacctatctgttatgctcatctcgcagcagcgcagatgggccagttcatgaaattcgaggaattcgctgagacttcgtctggaagtggtggtgtcccttcgtcatcaggagcagtggtcccagagttgccgcgcctgcatgctgatgtctgcagttcgatgttcttttgttgaggtggtgttagtcagctagtgtgcagcagggctgatccttcttttttttttgaaggaaccaaatacggagtacttgttaggcacttttgtagtactctagattgatactatgagatacatctaggttgggtagggagcatttttttttagatgatatagtgctcctaatgatatagttctgttagtgctcagctattaggaagtaaaggcttacccttgatggtaggtttatgaattcaagacgctaactttgcgccatatctaattgtcaaccagttaaacagatgattcgcacatgcctgtttcgctctcagttgtatccgcatcttattttttgcatttttttcatatatttgcaccatcgtgat

SEQ ID NO: 890 - DNA, 12618 bp, Oryza sativa
  source 1..12618: mol_type = genomic DNA
cgaacacggcgtcgaacgcgtcgaacctctccggcacgccctccaccactccgcctcccctgccgcctccgcctccctccaagtggaagcacctcacctcgtcgtgcccctccttgatccccgccagcacgtacagggactcgtgcgcggccaccaggagctcgcaggggtgccccgagaggagggcgtccacgaaggacggcgcgggggtcacggccagcacccgcgacgcgggggagagggcccccgccgcgagcgcgcgggggaggctgccgcccgcggccgccgccgccgccgcagcatcgaggaaggaccagtccttctccactacgtccgcgacggcgacgccgtccgggaccgcggcaaccgggccggcgcgacgggagggcggcgagcacgcaaggctgagccgtaggggggtaggaaaccccgggttgatgggtcgcgagtagggtcggggtcgcggggtagggaggaggagaggggagaacgccagcgagagggaggcggaggcggaggccatgggaggagagggtggtgttggccggaacgggaggaggatgggaaggtggaaaggtagacaatgcagtctcggcagagtgagtagtagcggtaactatgggccgggccaggaaaccatagccattaataattcggcccaattagctagttgctggttagagagttacgggcttctgaaatagtgtactgtatctcacggcctgtttgttacgggcttctgaaatagttacgggcttctgaaatagcggtaactatgtttggtactcttgccgcgagcccccgaaccgcgagtccatgaccaatcaccatccatggcgaagatgaatagttcatgccgagcaaaattttttttctgcacggtgattcaaaattcaaacagtaagtataatcaatcacagattgagcatagagatatgcatgaaaatgcttcctttttttcccatacaaaacgtatgccaagggaatcgtacgagtacgatggaattcaaacggtaaccagaaagtttcggaaattttcagtttttcacacaaaaggaaactgtgaccagaaaacgaggtgatcaccctgctcctggcggacccacacgaccagccgatcggacgatcgccgctgccagacaatgggtctacacgaatctcaaagcccaaagtttgaatcgtcccgctcttggccctcccggcgctgatcagtcttcgcccaatgacacgtgggtcccactgagagatcacagatgctgctgacatcgcgggaaggacaagccattgactagtctctaggctatccccaccggagagaaaaagaagaccaacagaactgaggatttgaggaaggaaagtgtccgtcactgcaagtggggcccactcggaagccacgaccccctcttttgcatgagctgcggcgagcacgggcccaccgcccaccgcccctgctctctccgatttccattccaatcttccgcgtcggcacgagaccacgacgtcacgcattcccgcgaatccggcctgctcgagacctcctcccgtcgcgacgccgcaagccatcaaagcgcctcctgcttccgctcctatccaaggcgaaccacactctgcgatcgagagctcgctgagccgtaaaaccctagctaatccttctctctccccccctctcgctgtcgtctccgtctccgtctccgatctccgcggcctcggttgcgggctgcggctgcgccggtgcggctccatggtcccggagccggctcccgcggcggcgacggagccgaggcgctccacgcgcaggcgcctaatgacggccgccgcgatggaggccgaggcggaggcggtggccgacctcgacgagatcgaccgcgagatgtcgcgcgccgagtcgcgcaagcgccagcgcaggacggcgaaggagaagcctggtgcccgtaagggagcgaccgaatggaagccggaggacgtggagaaggcggcggcggcggagggggtggccgagctcgacgagatcgaccgcgagatgccgcgccccgagttgcgcaagcgccagcgcaggacggcgaaggagaagcctagtgcccatgagggagcgaccgaatggaagccggaggacgtggagaaggcggcggcgcaggagcccgaggggaccgagctcgacagtgggttgtcgcccgcagagtcacgcggcaagcggcagcgcggggtggagaaggtcaagcgtcgtacccgtaagaagacggccaaggagaagacgaaggagacgaccgagaagtcggcggctcaggcgcccgagaagatgaaggtgaacgatgcgggtggcgcgctggccgaagacgtgtgcgcggatgagccggacgccgaacagatggccatggaggaggaggaggaggcagccgacgtgctggaagcagaggagaggatgggtaagtgtgtcggagaaggatcagccgagaaggctgcgacgaggaagagggtggcgcggccaagcactgcgagaagggtggaggactcagatgaccactttgtgggcgatccagtaccggatgatgaagcgcgacaacgatggcccgtgaggtacagtagaaaggtaagaatttctagtaaacctctaactctattctagagttatctcctggaatactaaagtttgttatcacttcgattttgagatgattttgaaaaataaaactgacatgctcttttgtttttgttgcaggggtctgattcgcttcttaagcaggagtatgtgtgtttttacgctaacattgttctgaaagtactcttaatctcttcttatgctgcttttataatggtgatcagaattttcatttatgcaggcctgacgaagatgaagaaatgaaggctcgatgtcactacctggctgctaatgtggatgatgaaatctatcatcttgatgatgatgtctatgtcaaggtcagtcatgaatatcttgttcacacttcttagaactttattaaccaatgttgtttcctagttttatgtattgcttttacgatagcatttttatatgactgactaacaagggatgattaatgtaccttttactttctgccatttttgttttgctcttcattataattgttattaaacttattatcctactatttgttctactggttgttaaccacgagatattaagttttcgattaatttgttggcactcattttgtacgcacgtaaattttctcatatcattgttctgtgcatatcaattttgtgtgggaaatgggtacataacttgatttgactgtggagattaataagaatatcatttcgtttggcttgcatatgctctatggtgtatcgttgtaaattattcatgcgttatctatttgcttatcatatgtcttgtctactaggtccatatgaaccaaactaactaatttgcaggctggtcctgatgaggaaaattacattggacggattactgaattttttgaaggagtcgaccgtggatcatatttctcttgtcagtggtttttccgtacagcagatacggtatgtctgaactctgaagtacctttttgttgctttttaatggaaatgtaacacttataagagacatgtatttgcaggtcatctcatcaaagttgttaaaggtgcatgatcatagacataaccataagcgtgtttttctttcaaaggagaagaatgacaacttgattgagtgcatagtctcaaaagtaaagattgcccatgttgatccaaatgtaagtgatatattcattaggcatatatcctatttaatgcttattatgttgtcatgttacagatgattttttgttgttgctaatatttaaacaaattcagatgacgcctcaagcaagagctcatgctatatctgattgtgacctgtactatgacatgtcttactctgttgcatattccacgtttgcaaatcttccagcaggtaattgtttacatgattcttttcccattgcaattatcataggtgtgtatgtgcatcattcactttgttgttaacttacataagagaccttttatgataaactgtatgagaaaaatattttatattatattactattttgaatatttgacagatgcaaaaatacacttgttgcttcaatattgtcaatctcaatgtttattgtcttatcttctgagggagctattttcttgtagataatgatggtgcattggggagtgaggcaacatcaaatatttcctgcgatgatgctgacaattcttctaagggaaaattgtcggctgatattgtggcaccatatagtgaacaaacagagacagcttctctgcttgatctttactcaggatgtggcgctatgtcaactgggctttgtttgggttttgcattttctggcataaatttagagactgtacgttttgtacttggtgtgactcctaactgcctactaagctcttttgtctattgacaatgttaatacttgctttattgtgcagaggtgggctgttgacataaacaaatatgcttgtgcttgtctcaaacataatcacccatactcgcaggtagtacattcctgtttccacttgtgtactgccactagatagtatcaccttgcacatccaccacatagacaaattcatgtgtttgcttttgcctctactttgtaggtgcggaacgagaaaactgaggattttcttgcccttattcagcagtgggatgcactttgtagaaaatatgttgtccacaaaaacgatacactagaacctagtatagatatgcccttaaatgatgctgacgatgtaaatgagcctcttccagaagatatattcgatgtagaggagctccttgagatatgctatggtgatccaagtaacacaggaaaaaatggcttgtggtttaaggtaatagacttaatgtttactagttaactagcattcctttaatttcatatttatttgtattaatctagtgtggtactatattattgaaaaagtaccctgtgaattatattttatataggtgcggtggaaagggtatgatccaagttatgatacatgggagccaattgatgggctcaggttggtatctctttcattatgcccctttcacattttttgttttattgttagtgcctaatcgttacaaatttcagtgattgccctgagcgtattaaagaatttgtagagaaaggacacaaggaaaatattttgcccttgcccgtaagtatctttctcatcttctttttttccttttcagttttgttgtcatgccatcttatcatgtcctttaaattcgtaagggtgctgtggatgtcatatgtggtgggcctccatgtcaaggcatcagtgggttcaaccgattcagaaagcataatgatccacttgaggatgaaaagaacaaacagttggttgtttttatggatatagtgaagtatctgaggcccaaatatgtcctcatggaaaatgttgtggacatattgaaatttgcagatggattccttggacgctatgcaatgagttgccttgtggctatgaattatcaagctaggcttgggatgatggcggcaggatattatgggctaccgcagttcagaatgcgggcatttctctggggagcccttccatcaatggtttctctctatgctttcttaatcttattcctttgtgacacttttgcatattaagatgttacattcaccaataggtattaccaaaattcccacttcctacccatgatgctgttgtgcgtggaatagtaccaactacattttcggtaagagaattgagtaaataattgccaagatttcattattgtattatgtattgtcttaatatttggctgctccatttgcagcaaagtgttgttgcatacaatgaggtagacacccgttgcctacgaaaggctcttctccttgcagatgccatatctgatttacccaaggtttgtgttattttcatatatccatggatctttatcttttgaatgctgattggacaattgtgttgttctttttttgtatgtgctatattacaaatttacaggttggaaatgatcaacctaaagatgtaatagagtatagtgttgcccccaaaactgaatttcaacggtatatccggaacaaccgtaaaggtagtccatgatttgttactaattgaattaacaaatatcgataaatactgttcatgaaatctactccctccgtcccataaaaaaacacacctaatatgggatgtgaaacagtctgttcagattcgtagtattaagatgatccatatcccttactaggtttatttttttatgggatggagggctatgttcgtttgttatgctctttccctctgcatttgtggaattctaactatttaaattttcattagtgtgtgggtttgacaattgccttgcccgttggtttatgcaattctaagtgttgctacttgtagtttcttgattgaatttctaggccaagttactttgttttgttattcattttcagacattcaggattactcttttcgtggagatgatccttctgaagaaggtaaattgtttgatcatcaacctctaaagctaaacaaagatgattatgagcgtgtgcagcggatacctgtaaaaaaggttagcaaggcttaagattgtcatgccagttactttcaataccttggttgcttacctttttttctgtttcagggagcgaactttcgtgatctaaagggcgtcatagttggcccagataatactgtgcggctggatccaaacatttcccgtgaacgactgtcatctgggaagcctttggtacttttatattttgctatatttcaacaactgcaatgtcaatgtttcctcttttgcatgccattaattactgcttctctggataggtgcctgactatgccatatctttcgtcaaggggaagtcaactaagtaagtacgttgagcataatggttcattttacacaatcttgattgataattctaattaatctggcaatgcagaccgtttggacgcctgtggtgggatgaaactgttcccactgtagttaccagagctgagcctcacaaccaggtatcattttttttttggcgtttttcccatcttaatgccacttcggttgtaattgtgcataaacggactcccccatattgcagattattttgcatcctagccaagaccgagttctgactattcgcgagaatgcaaggttgcaaggttttcctgactattacagattgatcggcccactaaaggagaagtaagtgcttataggatgtttgtatcgattgtagtggattcaggaatcagtaatatggactttagtgtccatattttggattgaattactcacagatataatagtatatgacagatgagtgttgtgtagttccattcttatgctatgtattcttgttcaatgtagatatatccaggttggcaatgcggttgcaattccagttgctcgagctttggggtatgctcttgggctggcctaccggggtgaatctgatggagatcgagcagtactcaaattgccagagagttttatttatgctgatcaagagacggttgttaaatcttcggcaggaactcctggaagtgaaatagctgattcggaacagttgtttgaatagtatgttatctgagtcacttgtatagttgggtgatgtgctataattgtttctgtatgagtttcgaacacggacagtgcatgcattgtccaatgctccaaacattcactggttaaccctggaactgagtaatttgcatacgtttcttcattggatgtccatttctttctggtttagatatgtgagtgaaatactttatttgcttcgattctaattgagctgctgctacattgtattatcgggctctttatttaatgggatactggctacttttgagcaaaatctatccttatgctcttgtttttacttgtatgaaatttccctgtcctgtctgacgttacacaaagatgcatggaacgatagtgttcagtacaccagtttcgatgctgttttcttatatgggcataagttatttgttatttgacaactgctgactgttaatgaccgaagattcagtcactgtttttttttactgatacaaaattcatttaatttctattactggctctttattaaaagaaagaaaagaaatctacatggcacaaagcatttgcatggtaatatacataaactccttttttttttggagtttttcatggacgggccctgattggctgttagtactgctggacagtctcagtacttcagcgaaggcagatgtatttactttggagagcctggcatctgcgaaatgacgtgatccatggtaaaggaaatgcatcaatagctgactcggctagcttcctggtaagctatgaaaatcaattgtagccgatccgacaacgggaagatgatcacaaagggaagggccctatgtatatggaacataataaaaaagttccaactacaagtatgaacagacaggctgacagatggtgtgcgccgccggaatatttcgctaaactgaatgttgacgctggttacagagaagagtctggggatgcaagcgtcggatttatattcagagactgaaggggttggtgcttcttgctggccacaaaaccttgcatcaatgcggttcttcggcccaggcggaggcgctagcatgtctagaaggactgtgatcggcggttgaattgatccacatgccaattgtgatggagatggacaatgctgaaattgtcgatggcataaaacaacaggggccattgaaatcggcctgggcgacgacaattgaagagattaaaggagtgatgtagtgtttccaacaagtgcaagtgcacaagataaataggcgacgacaattgaagagattaaaggagtgatgtagtgtttccaacaagtgcaagtgcacaagataaagagagaagcaaatagggtagctcatgttttagcacaaatggcaatgagtactagatctcgtgcggagtggaaaaaaacataagctctttttttttttttgaatctacacagaagctcccttgaccaccaatgataatgatgtttgtcagctgagctccaatggttgggaacgtcccagttggcatggagaccaaaaatagaaaatataaagagattgtatcccagaaatgcgcgcgaggcggtgcggtggaggttggacaatgtgacgaaaccagcgctttgaagcctacttccttttcccttcccaattctgcttcaaccccttctgtttttttcagaaagaacagggaaaaaggaaggtacattattgattcttcaatttcatggcatttcaattcctctatttgtttggtactctgaatgttgtattcgatctcacctccagtttcataaaccccaatttcttttgcatgatgtttgcttttcttaaagtgaatgtggttattcccttgatcctagattctaagatgtaaggtaaagtagcttttgaactatcttccttgatgttccaggattctaaaatgtaagataaacaaaaaaaaaaggactgcttttcagcgtgtagttctgtatgaatggacatgttaactaaaccaaaggtctgatgaaacatgagacaagtccctcaaatgcagataaaatcctcaaatccctcactatcctctcccatggttatgcatcctttcttttttttttccttttagataatatcaccatttttttcctcccatatttttgcaggggtttatcgcgacgaggagccgaggagggggaggcgcgccgcgccgttccattccagaacatcctctcgtgggaggggtggaatcgtcttgatcatcgccggggcgagatccgtctcgacgtccggcgggaaatggacgattccccgctagataatctgtttgatggaaatggattggattcatcggcaggcgcggacagctctagctccacgggatcaccgccgagctccacgtcgtcgtcccctccgtcgtcgcagtcacctcctccggggtcatcgccgcctcctgccagcccgccaccgtccacaccgtcggccccaccgaccaattcctcgggctcagcaccgtcgccaccttccccgtcgcagtcggcgccaccggcgaataccggcggcggcgggtccccaccaccatcgcatggctcgccgccagcgccaaaggccgtccagtctcaacccgctccgaagcgtagcggcgacggtggctcctcctcggacagtgggagctccaaggagggaggcagctcgagtgaccgtggcaagagcgaaagcaacggcaacaggccggggccagaggctgccatcatcgccggcatggtcatcgggttcttcaccttcgccctgctgctggccatcgtcgcctgcgtgtgctgctccaagaagaagaagagacctccccacatgcacatgccgtactacaccgacgagaacggtaagcacacatctacacgcgacgcgacggcatggtgcgctcgccacgcatgccgcagagagatcttgtgcagttgacatggggtgcgctcccgcgtccgcgtgcatgcagggaaagtgtactacgcgaacagcatgcccaggtggcagaacagcgtggaccaaggcggcggctggcacgcgcagtactcgccaggccaggcgccgccgagcagcgagatgagcgggtcgcacggggcggggccgctgccgccgccgtcaccgggcatggcgctggggttctcgaagagctccttctcgtacgacgagctggcgctggcgacgggcgggttctcgtcggcgaacctgctggggcagggcgggttcgggtacgtgtacaggggcgtcctcgcgggcagcggcaaggaggtggcggtgaagcagctcaaggccgggagcgggcagggcgagcgcgagttccaggccgaggtggagatcatcagccgtgtccaccaccgccacctcgtctccctcgtcggctactgcatcgccggctcatcccagcgcctcctcgtctacgagttcgtccccaacgacacccttgagcaccacctccacggtctccatatctttcctgctcttttcccagccatcgtaacgcgccattcgtacgtgagatttttgttcgattctgacacgcgcgtgtgccggatgcgtgcagggaagggcgtgccggtgatggcctggacgacgaggctcgccatcgcgctcggctcagccaagggcctcgcgtaccttcacgaagattgtaaggtccctaataaacttttcgtttaatttgcagtctgcagggacaaatcctgtctgtacgtccttctaacgatctgatttgttgcattgtggttgtcacgtacgaaggccatcctaggatcatccaccgtgacatcaaggcggccaacatcctcttggacgagaatttcgatgctaaggtgaacacaccagcttgtttaagctgcgtttaagattgaactagctagtcctgacttgtttgaattcatttgcattaggttgcggatttcgggcttgcaaagctaaccacggacaccaacacgcatgtctcaacgcgcgtcatggggactttcgggttagtgcaacatgagaccgtggctcgctcgttgacatgcatgacggacgagcgggcacggatgacgagtcccagttacatgtgtgtaggtatctggctcccgagtacgcgtcgagcggcaagctgacggacaaatcggacgtcttctccttcggcgtcatgctgctcgagctgatcaccggccggcgaccggtcgacccaacgaactacatggaggacagcttggttgactgggtgagcgtcaccctcgcctccatcgcaaactaccactactacatcctaagcttacatacgtggttctgacacgccggccactcgatcgcttggtcgtgacaggcgaggcccctcctggcgcgcgccttgtcggaggacggcagtttcgacgagctgatcgaccagcgcctggagaacaagttcgaccggctggagatggagcgcatggccgcatgcgctgccgccgccgtccgccactccgccaagcgccgcccaaagatgaagcaggtaattgaaaccgcacagctcacagtgatcaaactgatcatcgatcacctggttgcctggcaatatatgatattttttcttctttgcgtgtattgcagattgtccgtgcgctggagggcgacgcgtcgctggacgacctgaacgaaggggtgaagcccgggcagagcatgatgttcagcacggggtcggagtacgactccggcaactacgcttccgacatcaacaggttgaggaaggtggccttcgagagcagcatcgaggacagcagcgagtacgggacccactccagcgccgactcgggggagccaccccggcggcaacagcatcgctagccgtatgatcggaggcgtcgagctagacttgactatttcttcggtgcgtgagtgtggaaagtggaaactgtgtggtgttgcgagatggcgaatcatcgatgggaaccggggcgtaccgtgtatgtgggaattgggatactgtcgtgcatattgcaggccgatcgtttgacgtgactgctttgttggctgtattatcgtgtgatttaatgatgtatccgatcgatgagtaatgcgatattgcgcttatcttgcatata

SEQ ID NO: 891 - DNA, 5200 bp, Oryza sativa
  source 1..5200: mol_type = genomic DNA
tcactatgaattctccaatatccacttctccatctttctcctctccgatgccttgtgttgatctcttatcgtctctagcgtcttctcgacctcggctaagagcaccgccacaaaaacattctatttggacgctcacaatactatctttatcacctaccattataatgtctggtatgtgagaatcctctattataatgtcactaccattataatcgctggtatgtgggtcgcatcctcttattgctccacatattagtgtctgtaatggtagaacataatggcactaccatcagtatatgtaatggtagtgctattatggtagaacacaatgacacttttattacagatactaatgtgtaaagcaataagaggatgtgaccatcgccaataactactgtcgatattttcttgttgcgttcggtagagtgagattgcgagtttgtttgtttcgttttccgcgcgcacacttcccgaactactaaacaatatgtttttttgcaaaatttttctataggaaagttgttttaaaaaatcatattgacccatttttgaaattaaaaatagttagtattcatttaatcatgcgttaatggctcaccttgttttgtgtatcttctcgatactcttctcctcgaactcagtctcctctaaatttaaattggagaacactcgcccctcctctttctatatcatgactcgatcaatccatcttgtttaaccactagtgggacgctactatatctaagttttacgttaccgttggtaaccgcgccgttaccggccttaccgcgggggtacggtaatagaaataccgcggtaacctccttaaattcaaataaaattaaaaaataatttgaatttttgataaattttatacgggtttgtacggtttttcacggttaccacgcggtaaccccggccccggcggttttggaaaccctgactatatctcatagagcttatcggaggtcgccaatgcgcaaaatctatttaaaaaacatctaatagtgtatcggaaacatatacaagtgaatggacaaaaattaatcacatataataaaaaccaacaattattcatatataagaagatttcaacgtgtacttaaaaagttaggtgagaatttatctggttgaaacaacaaagtgcttgacaactaagagttgaagcctcaattattgcaccaacgataagttcacctacttttttttctctctcctcccaccttccatggaaaaatgtgctgcgcacaaaaggaatctatggccactttggtgtgcagccaaaaacatccagaaaaacctcttgtaggagggcggaaatgcgttcccacagctcacctctccgcagaagatccttgtgtctgtatcgtccacagagccaagcccttacaccgccctgtgaacagtcactgacaatcctggcccacgcacgggtgggtcccacccgtcagtgaagtggctcaggcgacatggtcgcaggcgcgcctgtgggtttcgtctacactagtcgtcgtcgagaggcgcggaggcaacgccgtgtggtcgccatcgccatcgccttcctcctcctcctcctccgccgccgcgcgcttcctcgccaccgcgcgcccagggccatcggcggcggacgccctcgcccacgcgcgcgagagaggggggcgagagattatcggacgagtcgctttgcggagctttctagaatggtggtaagggctcccgctccccccctccgaagcctcctcttcctctctcctccaatctccatcctgctgctgctgcatgatgttagtttggccgtgccgcggcggacgaccctcctcgtcgttgttcgtggattgctccgtgcacgattaggttgtgggtttccgtttgggattgggatggaggggctcctctggtctgtttagtcgcgaaagaatgatactttcttgtatgttttgctgcattttggatcctaaaattatctgatactgtattgatgtcgcgcttgagaattcgattttgcgatgtcgcgtgaacagttcgggcttgcggagcgtggaggagcagaatatttccccccttttgatttggatttagggtttaactgtttggctatccccttgaaatttgatgagggctacgtgatataggggtggcagtatgcctcatacaagatgctacattcaacccgattcagtacttgcgttaatttttctcctctgaatcgccttgttttcactgttagtcgggatatttcagacgtgttgcttaatttatgtcacaggactgggcttcagatagcgacaatgataagttcgagtgggacacagacggtgaggctgagacctcatctgccccggccctaaggaacatagatgctcctggtccgtccacgaggctgccgcaggtaggagatagaggtctatctttgaacacacgtgctagtcatttgttcaaaccatgttgttactttactgtaattataatcaaaatgtggtgtttgtttgtggaactgtctgaaggatgcaaatgggaaggccaacgggtcaggtgctttggttgctgaatttatgggaatgggattcccaaaagaaatgatcttgaaagcgattaaggagattggtaacgataacaataatctagttctcttatttgcttctggttgcattttgaatcttctgtttcaactgctgtcttttctttcaggggatacagatacagagcaattgcttgagttacttctgacttatcaggtatttgcccacatggttgcatcactctgtttattattatctaatgctctactgtacaagtgatgccgtgtaatgcaggcaataggcggtgacgcttcagtgggtaactgctctgcttcggcctgtgccccccagactcttgaagtcgacgaggaggaggatgatactaattgggatgaatatgatactgctggcaattgtgacaggactcctcactctgatggttctggtgacgaggtatttacatgaccccctccttggtcattatatatttatatgcacttgctgtgtctatttcttgaccagtttccctgatcatggctgcaccattttttgcacttgcttcatgctaagaacacattcccttattaatacctatgtaagtgaactactggtcgtataataaattagaaaatttcatacctgtgttctatttcactcttagtaaacaagtatagatatggttagctatactgcagtgctgtagtcttttgtatctataaaaccatacatgtccctgtagggttgttaaaggagctttgttgatccagcccttccttccatcattctatgcatctccagttagcattttctttatggtgcctttgtagtgagagttagcagaactactgtagaaccatcagagagaggatcatatatttggtagcagtaaattgtaggctttgcaaatggtatatgtgtataactgtatatgtgatgcctgcattagttgctttattaataggttattctggactgcaagtcattagagagatgtaacaagtgttttcaatttgcctttaatgtgcttttatgcaggatttctttcaagaaatgtcagagaaggatgaaaaaatgaagtccttagtcaacatgggttttcctgaagatgaagcaaagatggctatcgatagatgtggtatgcctctattgaatttgatgctttgacaggaaggaaccttattctgctgcctttgttggcttaaatttcccaggtctcgatgcgcctgtagcagtgttggttgattcaatctatgcatcacaggaagcaggaaatggttactctgcaaacttatctgactatgaggtaccttgtgattataatgcatctgaatcaataggttgtttcatttcattaaatataacggcattggcatcatctttataattgtgcaggatacagagttcagttcctttggaggaagaaagaaaacaagatttgtggatggaagcaagaagagaaagcggtatggaagtgggccatctgggaatcaagtgccgtttgatggcagccacgaagagcccatgcctcttccaaatccaatggtgggattcagcttgcccaatgagaggttaaggtcagtccacagaaatcttcctgaccaagctcttgggccaccattcttttactatgaaaacgtggccctagctccaaaaggtgtatggacaaccatctcaaggtttttatatgacattcagcctgagtttgtggactccaagtacttttgtgctgctgccaggaagaggggttatattcataacctgccgattgagaacaggtcacctgttctcccaatgcctcccaaaacaatatctgaagcctttcctaataccaagaggtggtggccttcctgggatccaaggaggcagttcaactgcttgcaaacttgtatggcaagcgcaaagcttacagagcgaattcgttgtgctttgggtagattcagtgatgtaccaactccacaagttcagaagtatgtcttggacgaatgtaggaaatggaacctagtttgggtcggaaagaataaggtcgctcctctagagcctgatgagatggagttcctgttagggtaccctagaaaccacactaggggagttagcaggacggagaggtacagggctctcgggaattcattccaagttgatacagtagcataccatctctctgtgctgagggacctgtttcccaatggaatgaatgtcttatccctgttttctggtattggaggagcagaggtagctctccacagactggggatacatatgaaaacagtgatctctgttgagaaatcagaagtgaacagaacgattctgaagagctggtgggatcagacacaaactggaacgctgattgaaatcgccgacgtgcggcatcttactactgaaagaattgaaacattcatcagaaggtttggcggttttgacctggtgattggtggcagcccgtgcaacaaccttgctggcagcaaccgccatcaccgagatggtctggagggcgagcactccgcgctcttctacgattacattagaatattagaacatgtaaaggctaccatgtcagcagtctagtttaagctatcacattaactaactctgtgatttattgttgttaacgaagttagaacctgttgattgatattgctgaacctgatgtgatgttattgcactcaaacaggagtgttttttcc

SEQ ID NO: 892 - DNA, 4252 bp, Oryza sativa
  source 1..4252: mol_type = genomic DNA
ccactggcgtgctgtttttccttgctcagaaccccatcacctggcaatctcaaaagcagaaggtggtggcgctctcttcttgtgaagcagagtatgtggctgcgacaacggctgcgtgtcaaggggtgtggttgcaggggctccttagcgaaatacttggagcaccggcgacggcgccaattctcaaggtttacaacaagtccgccattgctctatcaaagaacccggttcaccacgatcgaagtaagcacatccaaactcgttttcatttcattcgagagtgtgttgatgacgggaagatcatcatcgagtatgccagttcagtggagcagctagctgatctgcttaccaagcccttgggaaggcagcgtttccaggagctgagcgagcttgttggtgtgatcaacacaaaaggccaaagttgaacttcacaagatttagggggagatttgttacaaataaacttgtgtggatctgctttgtgtttttggttctggtagtttttccctcccctatttttctgttgattctgttagagtcacgcacatgacctcgctggtttttcggccgtgtgcgacgttgggctcgtcgtgtgcatttagttcgcacgggagcgcatcatgcgtgggcacgatcctggtgattgggatggcagtcgccgttgagggatcgtgtccgcatcaaccgggccaacgtgcctatgatcttgtattcgcagaataaaaggaagaagataaacagaaaatgctgctcagttgttcgcagcgccaaacatttgtgttctgtgtgattgctgttcttctctctcgcgtccacgttcgcgtgcgttacgggttttttgctaacatcctcctcttccgccgcgcgcttcctcgccaccgtctctaggccggccattggcggaggagagggaggccggcacgccgcggagcagcaagagattgttgcccgaggcgcttctcggaccttctacaatggtggtaagagctccctccctcctcccctctcctccatccatgacgtcagtttggccacacccaatggttcccgctgccgcgtgcaggcgatgcgcttgtgctgctgctgttcgtcgtgtattgctccctctgtgcacgatttgtttgtgcatagggtttccgactggaattgggttggaggggcttctagtctgttcaatcgcacaaggatgatctgcattctgatcctaaaattatttcttactatgatttgtgatgtcgcgcttgaaaattcgatttgtgatgtcgcgtggtgcggactgcatgtggagtaacacaatatttttcccctttgtgatttgatgaggcgctgtgatatcggggtggcactggcagtatgccttacacaagatgctacattcaacccgattcaatctttcgctatttttttcctttcctctgaaattgccttatttccactggtagtagagatatttgggatgaggtgcttaacttatgttacaggactgggctagcgacaacgatgaggatagcgagttcgagtgggatactgatggtgagtttgaggcctcgtctgctccagccttttcgaacacggatgcacctggtctgtccacgagctggtcatttgtttaaaccatgatattaccttgctataattataatcataatatggtgtttgtctaaaggatgctaatgggaaggccaatggatcagcaccatcagctttggtggcttactttttgggaatgggtttctcgagagagatggtcttcagagctatcaaggagattggtaatgataacaataatacatttcctcatttgcttcaactgttgccgtttctttcaggggacacagattcggagcaaattcttgagttacttctcacttatcaggtatttgttcacgtggttgcatcactttgtttattatctaatgctctattgtacaagtcatgttgtgtaatactgtaatgcaggcgataggcagtgacccttcagtgggtaacagctctcattctgcctgtgacccctagattcttgaagaagaagatgaggaggaggatgttaattgggacgaggatgatactgttgacaattttgatagggctacttactctgatggttctggtgatgaggtatgcacatgactccctccttggtcattatatatttatatcagatacttgttgtgtctatttctcgaccaatttacctgatcatgatcaaacctttgttatacttgtttcatgccaagcacacattcccttttagtgcttgtctaaatgatctattggtccaataaattggaaggttttgtgacttaagttatgtttcacttttatttagtaaactagtgtacatgcttacctgtactgcaatactatagtttttttgggttatctataaaacagtacctgttcctgtagggttgttaaaggagctttgttgatcctgctcttacttctatgtttctttagctggcatttttgtatggtgcctttatagtgagggagagttagcagaactactacaggaccatcaaagaaatgatcatatacttctacaaggtcgtattcaaaccaagcaatgatgaaagatagtctactggatgcctataattgaatggttgcaagttaagaccaccagacagaacaatgataaccactggctacatctgaacacataatagacaacaaaaaatagaactgaaatgatgcctatgagagcttaggtaatctgtgctgggcatttatccatgtgttgatgattgataagctgtactccccctcctttttgtggcctaacaggctttcttgtttcaccattttttgaatagttttactactttttcattacatatttagtatgagtttcctctaactttaatcctcaaaataagttcctctatagtgtggtagtatctgtttgcatggagttgtaagacgcaacaacaaatttgacacagaaggataatcgtatattttgttgcagtaaatttgggttttacaaatggtacatgcatatatgtgatgcctgcattagttgctttgttgggaggttatttcagactgcaattcatgagtgagatgtagcaaatgttttcagtctgcttgtaatgtgctttgttgcaggactttttacaagagatgtccgagaaagatgagaaaatcaagtccttagtcagcatgggttttcctgaagatgaagcaatgagggctattactagatgcggtatacctctattgaagttgctgctttgacagtaaggagccttatactgcctatgctgggttaaattttggcaggtctggatgcgtctgtagatttgttggttgagtcaatctatgcaccagcatctgcaggaaatgtttattttacaaacttatctgactatgaggtatgggtaccttgtgattatagagcatctgaatgatgaaattgttttcatttctttaatgtaatgccactggcataatgtttacttttgtgcaggatacagagttcagttcctttggaggaagaaagaaaacaaaattaatagatggaaccaagaaaaaaagagaacggtatagaagtagaccacaatggaatcaagtgccatttgacggcagccatgaagagccaatgcctcttccaaatccaatggtgggattcagcttgcccaatgacgggttaaggtcagtccacagaaaccttcctgaccatgctcttggaccaccattcttttactatgaaaacgtggccctagcaccaaaaggtgtatggacgaccatctcaaggttcttgtatgacatttatcctgagttcgtagattccaaatacttctgtgctgctgctaggaagaggggttacatccataacttgccgattgagaacaggtcacctgttcttcccattcccccaaagacaatatctgaagcctttccttctactaagatgtggtggccctcttgggatccaagaaggcagttcaactgcttgcaaacttatgtggcaagcgcaaagcatacagaacggatacgatgtgctcttggtagattcggtgatgcactacctccagcagttcagaagagtgtcttggaagaatgtaggaagtggaaccttgtctgggttggaaagaacaaggttgctactctagagcctgatgagatggaattcctattgggataccctaggaatcataccaggggagttagcaggaagcgagatatagagctcttgggaattcattccaagttgatacagttgcataccacctctctgtgctga

SEQ ID NO: 893 - DNA, 5716 bp, Oryza sativa
  source 1..5716: mol_type = genomic DNA
gcccttcctttgcctcgccgccgttgtcgggagatgacggcctggccctactcttctctgctcctctaattggtcccaaaccggcgccggcagcgcgtcgtatgccgccgccgccacccggagtcccgcgccttggcgtcctcgccgccaccgctcgggcctctctagcggcctgaccccgaggtcgcacgcgcggtgagccggtgacgctctcccttctcccgtatcgtcaacgatgccgccgccgccgccgcatcgccggcccgccggatgtcctctcccacctcgccccgacgagctccccacccgccgagcatcctgcagaggggaaagagagagagagagagagagagagagagaaatagagagagaagaggaagggggagaagggggaagggagaggtgctgactgtacaccctgacatgtgagacccacgtgggtcccacgctgactcagccgccacatcggacgaaactgggatcaaaaccaccgaaggacataaagtgaacgattttgtaagttgagggatgtcttatatctagttttgtggttggaggatgattttgtaattcgatgacaagttgagggaccttcggtgtactttttcctctatggcatgaataccaaccagtagatcgttggcgcctcattcccttcctcctgggccgcaacgggattaatggctagcttgaggcccatattattgttgggccgtaacgggaatgctagatacgtgcggcccgtcttctctggtagtcgtcgacaagacaagccaaggggagcggaggcgacgacgtccgaccatcaccgacctctcctcctcttccgccgcgcgcttccttgccaccgcatctaggccggccatcggcggaggagagggaggccagcacgcggtggagcagcgagaggttattgcctgaggcgcttcgcggaccttctacaatggtggtaagagctccctccctcctcttctctcctctcctctcctctccttcctccatccatgacatcagtttggccacacccaatggttcccgctgccgcgtgcaggcgatgcgcttctgctgctgctgttgttcgtgtattgctccatctgtgcacgatttgttcgtgcatagggtttccgactggaattgggttggaggggcttctggtttaccctttattcaatcgcacaaggatgatctgcattctgatcctaaaattatctcttactgtgatggctgatgtcgtgcttgtgaatttgattcatgatatcgcgtggatatattgcgaaccgcatgcggagaagcataatattttttcccttgtgatttgatgaggctatgtgatattggggtggcactggcagtatgccttacacaagatgctacattaaacccgattcaatctttcgctatttttttcctttcctctgaaattgccttatttccactggtagtcgagatatttggggtgaggtgcttaacttatgttacaggactaggctagcgacagcgatgaggatagcgagttcgagtgggatactgatggtgagtctgaggccacgtttgctccagccttttcgaacacggatgcgcctggtccgtccacgagacccaggctgcaagttggagatataagtctagttgaacacacacgagctggtcatttgttttaaccatgatattaccttactataattataatcataatatggtgtttgtctaaaggatgctaatgggaaggccaatggatcagcaccatcagctttggttgcttactttttgggaatgggtttctcgagagagatggtcttcagagctatcaaggagattggtaatgataacaataatacatttcctcatttgcttaggttgcattttgcatcttttgtttcaactgttgccgtttctttcaggggacacagattcggagcaaattcttgagttacttctcacttatcaggtatttgctcacgtggttgcatcactttgtttattatctaatgctctattgtacaagtcatgttacgtaacactgtaatgcaggcgataggcagtgacccttcagtgggtaacagctctcattctgcctgtgacccccagattcttgaagaagaagatgaggaggaggatgttaattgggacgaggatgatactgttgacaattttgatagggctacttactctgatggttctggtgatgaggtattcacatgactccctccttggtcattatatatttatatcagacatgatcgaacctttgttacacttgtttcatgccaagcacacattcccttttagtgcttgtctaaattatctattggtcttggtccaataaattggaaggttttgtgacttaagttatgcttcacttttatttagtaaacaagtgtacatgcttacctgtactgcaatgctgtagttttttgggttatctataaaacaatacctgttcctatagggttgttaaaggatctttgttgatcctgctcttgcttctatgtttctttagctggcatttttgtatggtgcctttatagtgagagagatagcagaactactacagaaccatcaaagagatgatcatatacttctacaaggtcgtattcaaaccaagcaatgatgaaagatagtctactgaatgcctataattgaatggttgcaagttaagaccaccagacagaacaatgataaccactggctacatctgaaaacataatagacaacaaaaaatggaactgaaatgatgcctatgagagcttaggtaatctgtgctgggcatttatccatgtgttgatgattgataagctgtactccccctcctttttgtggtctaacatgctttattgtttcaccattttttaaatagttttactactttttcattacatctttagtatgagtttcctctaactttaatcctcaaaataagttcctctatagtatggtagtatctgtttgcatggagttgtaagacgcaacaacaaatttgacacagaaggataatcgtatattttgttgcagtaaatttgggtgtacatgcatatatgtgatgcctgcattagttgctttgttgggaggctatttcagactgcaattcatgagtgagatgtagcaaatgttttcagtctgcttgtaatgtgctttgttgcaggactttttacaagagatgtccgagaaagatgagaaaatcaagtccttagtcagcatgggttttcctgaagatgaagtaatgagggctattattagatgcggtatacctctattgaagttgctgctttgacagtaaggagccttatactgcctatgctgggttaaaatttggcaggtctggatgcgtctgtagatttgttggttgagtcaatctatgcaccagcgactgcaggaaatgtttgttttacaaacttatctgactatgaagtatgggtaccttgtgattatagagcatctgaatggtgaaattgttttcatttctttaatgtaatgccactggcataatgtttatttttgtgcaggatacagagtttagttcctttggaggaagaaagaaaacaaaattaatagatggaagcaagaaaaaaagagaacggtatagaagtagaccacaatggaatcaagtgccatttgacggcagccatgaagagccaatgcctcttccaaattcaatggtgggattcagcttgcccaatgacgggttaaggtcagtccacagaaaccttcctgaccaggctcttggaccaccattcttttactatgaaaacgtggccctagctccaaaaggtgtatggacgaccatctcaagattcttgtatgacatttatcctgagttcgtatattccaaatacttctgtgctgctgctaggaagaggggttacatccataacttgccgattaagaacaggtcacctgttcttcccattcccccaaagacaatatctgaagcctttccttctactaagatgtggtggcccttttgggatccaagaaggcagttcaactgcttgcaaacttgtgtggcaagcgcaaagcatacagaacggatacgatgtgctcttggtagattcggcgatgcactacctccagcagttcagaagagtgtcttggaagaatgtaggaagtggaaccttgtctaggttggaaagaacaaggttgctactctagagcctgatgagatggaattcctattgggataccctaggatgttggataagtctttgtggtccttggtcgtgattcttctttttgcttttgggtagtttcaccttttcaggacagcatctaccctttagcatatttttcagttgctaggacagctacggttagtaggacagcagcagttagcatctcctttatgcctcctttatgctttattcagtttggatgccctctaggacagcatcccattcaaatttcgaattttagactaggagggtgcagcaataggctagtagccagctatggctatatatatgtatccaacctctctcgggtaggtatggcttttgtgttttgtgaatgaagaaaaccagaaaattgccccatctcgagtgccatcctcttctcaatgagagtaaccattgaaattctaacataggaattataccaggggagttagcaggacagcgagatatagagctcttgggaattcattccaagttgatacagttgcctaccacctctctgtgctgagggacatattccctaatggcatgaacgtcttgtccttgttttctggtattggtggagcagaagtagctctccacaggcttggaatctgtatgaagacagtggtcttagtcgaaatatcagaggtaaacatgacgttgctgaggagttggtgggaccagacccaaactggcacgctgattgaaatcgcagatgttcaaaatcttactgctgaaagaattgaactattcatcagaagatttggtggctttgacctggtgatcgggggcagcccgtgcaacaacctcgctggtagcaacagataccaccgtgatggcttggagggcaagcactcagcactattctatcactactacagaatcttggattctgtaaagactattatggctagcatgtaagctagcccattaacgaactctgtgaattattgttgctaatgaaattggaacctgatggttgaccttctttcacaaggtttctcttgccatggctcaatacgttctactaatttaccccaagtgcaaaatgctccttccattttgataatgcttgcagttttggtgcgaaaggtatgaaaattacatctgacaacatgtctctcatttttgtactactattatgtatacaaactgaagattgccatggaggaataggctaatgctattaaggggctttgtttgattactacaagctgaattatgaacatgatttgagcaccatacgctagattcatctctgcttttgctgaagttgaaattctgcaacctgaattgtacctgcatttctataataacctttatttattttgactgtgcctgaatgtctatagcttgcacctccaatgcaagtacatttccctttttcctgttgatatgcacaattcacttgatatatctttactataacaaaatcttgaatctttgaaggaaagttgtttcgccatgttcgcaaggcccttctgttgaaacaatcctcctccttgacactgaaaactgaacaagatccttccaataacagtgataaggattccatggacaaataa

SEQ ID NO: 894 - DNA, 5524 bp, Oryza sativa
  source 1..5524: mol_type = genomic DNA
gttttgggggagtaattgttagaaggaaaaattgcaaaaatgtacctcaatatcatcctgagttaagatcccctataaaatatttgttgcagatacttcctcctcttttctcgaatacgcaaaaggattgcacatcaatatattagaagaaatgaatatttgttacacacgcaatcagccagaccaacttatgtgaagaaagggagggaaacaaaagaccaagttactacgactccaaacagtgggaaaggcagagcccactactctcccaaaaaaccctaaaattagcaatgccagctaacgaccatagatggccctctgagaggatggattgtaggacctccgagaccgaagatagtgtagagttgaaaaccttggagttccgttccttccacagttgccaggaggatcagagaatcgaagccgggatggagatgctcaggcaagcatgccctagacgaaggccaccagatacactcatatttgaatactgatagacaagaaattccccgcacatcaagcctgagatgacacgattagcgcatcctcactcattgcactcaccacgttgttgggccacggcgatcgtaagtctccactatgggataccggaagatgagatgttgtgcttggctcatgggattcggtggcggctggtttctttggcacattcaaattcagtagatgattttggtatgacattgtgccgctaagaatgaagatgtgtcaagggccatgtccatcaagaacataacacaggtggaaagaggagaaaaaacacgggagcaaaattgattggggataaatctcaaaattaagatgaatgaggaggtatttatagcttagaggggaatctgaaactgagatgagatgatggttttgcaattttcaatttagggccatttgaatcagaaaaatttatatatgatttcatagtattcaaatcttaatggaatttttcctatgtgatcatttgattcaaaggttaaagctttccaaatcctatgaaatttatatgaaatggctcattgcatgtagattttggaggaaacttagtaagagttctaactgcttagaaatttttttagtctatattaatctctcaaccgatttctatttttcttacaatccaatcagacgactattcctatgttttacaattctctattttacacttgtattctaattttacgttcttttttatttctcagtttttccaaccatgcgatttcgagtgggctcttggattctgaactcccgtttatgctggcagaacatttcctacacgttgcaacgctcaacagacaagaacaaacgacaaacgcactgaataagcacaggccatcataaacccccatggagtagtacgaagcatcagctcgtcaggtcaaagctccctgacatgtgggccctacagaccaccgacaggtgggacccacccgtcatcatcatgaccgcaccaactcaactctcactccccctcacctccctcccccttccaccgtacacccccaaaacccccctgccttctctcgccgattccgccaccgccgccgcgccgcgcctcgccgccggccgcccttcgatctcctcctcctcctcggaatggatctctacatggacgactacatcgacccctacgaggaggccgaggcggaggccgccgcggaagccgccgggctgacgtccgcggcagcggcggaggactcctccgacgagggcgactccgaggacgactccgaggccgagagcgactacgaggagaggtcctacggcctcctccgctccggcaaccaccgcgtgcgcaacccggacggcaccttccgctgccccttctgccccggcaagaagaagcaggactacaagctcaaggacctcctccagcacgccgacggcattggcgcctccagcaagcgccgccgccacggccgcgagcgcgccttccaccgcgccttcgcccgattcgtccgcaccgacccttccttcgcccaagacctcgccgccatcaacgggatcgccaccactgctgatgctatctctaattctagtgctgccggtgccaaggagaaggcggatgccaatggcgacacagacggatccgcttcggtggcggctgtggccgcggggaatagacgggaggaggagaggtttgcttggccatggagtggggttcttgcagctggtgcagggttcaatgccgaggacttcgcggatagggtcgcaatgtttggtttggatgatgttgtgcctttagttgtcgatgatgcggaaggcgctgatagctttgcgattgtgaggttcgctaatggttggggtggattcggcgatgcgctcacgctcgagaaccatttcaacaagaataagcttgggaagaatgaatgggatgcaaggggtagtgctggagatgctgtgaagggagatgatggggacacagatgttaaggtttatggttgggttgcccgagaaggggactataatgccgggaatgtggtgggcaggtatttgaggaagcatacgaacctgacaaccatagatgaggtctccaagagtgaatcggaaaagtcggggaagatggtagcgatactggcaactcagatcgaggcgaaaaatcgattcttgcaggacttggagacaaaaaagaatgcaaccgaactctccattgcacggctcgaggaggacaacaggaagctacacgatgcatataatgaaggtatgatgtgcaactgtgcttcatttcttataggcgtagttgtcacatgcctagccatgttagctgagcttgtatgaactagaggaaatcaagacatgatatatttctttttctgtttgacggttgcactatcaatttgctgttgtgatgctaaaattcctaaatgtcagaggtacaggagatatgcatgtcatttgcattaagcaaagaataaatttgctacaaggacctgtggcacatgagtatccccatttgcccactgtcataacccatagtcattgtagcatgcgtgaagataacaagaaaaatctaagagtatcactaacagcagaactagattaggttgtaggtagttctctaatgcaatttgctcctgcttccatccgctgttcacaatcaggcctgatctgtaaccactggtcctgtaacctgtcatcgcttactggtagtttctccaactctccatacctcaaggacatgaattatctatagaatctacacagaagcagcaaatgatggattgtctctttgtcctagaggcacatgtcaaatactcaaatgattgattgtggaggagccctctgcactgcaactgttgggctatttagcttcagcctttatattagacatggattatttagagaaatagcatcctcttagttggttagactgttagacaaatagtggtcaggtctgccattatctatgtgattcctttcttgttttgttgtatgctattaccatataccacaagaccaacctggttagataaatgttggtaacagggacaaacacaataataatcctaatcattaactttcatcgcttagctagtaattgtattttcatttcgttataaaataaaataaaaactgtctaagacatcaatgtacgacgttgtaacaacatttatatttccatttcagaaatgcgcaatctacaccggagagctcgtgattatgctttaagagttttccaggataatgaaaacttgaagcttgaattagatagcaggaggagagaattgaattcacgtgctaagcagcttgaaaagataacagctgagaatgcaagcgacaggaaaaaacttgatgatcagaagcaaaaggtaatctaatgaactatctaggtgaaatactaagctacgatcatatgcacctctggtgaagtatcatgcctaggctatactgttaatttacatgatttgcaatacacttattttgaggtattgaatgtttctgttatgataacccaagtgtgtactgcaaatactgtatgtaatatatatgcttacttcctgaaatgtaatgtataggcaaaggatgataatagtgaacttgagctagcaagcatagaacagcagagggctgatgaagatgtaatgaagctagttgaggatcagaaggtttgaaacttttttttttacttctgttattttttcctgtttagcgggactgtattctcttatgatgagaattgactcactgatacaccttaaaaataacagagggaaaaggaagatgtccttgcaagaatgcttcagctggaaaaagagctgcatgaaaaacaacagcttgagcttgaagtaacacggctgaatggtacacttcaagtgatgaagcatttggaaggagacgatgatggggatattcatgataagatggagaaattgagtgaaagattagaacatgaaaagaaacgtttggaagaattgagcggagagctggtgaagaaagaacgtgaaagcaacgatgagttacaagaggccagaaaagaactgataatggtattactccatttctctatgatgattggcaaaattccttatacctatctgttctttatttctttaatgattgatattcatgaaaaggttttcatacatgatcataatcatttgcaattgacagggtttggaggacatgctaactgggcgaactgctattgggataaaaaggatgggggaacttgatgagaaacctttccaaaatgcatgcaagagaaagtacggaaacgatgactatgagaccaaagctgcggagctggtctcaagttggcaggaggaaataaagaagccatcctggcatccttataagattataacggttgatggcgaagataaggtatttgctctgctgttctatgttttactcttgtaccatctctgacattagaccctagggtttttttcgtaagtggtaaccatcgtcgaattttataggaagttgtagatgatgacgacacgaagctgcggcacttgtggatcgagtacggtgacgatgtgtgcaatgcagtgaagaccgccctgagcgaggtcaatgagtacaatgccagtggacggtatgttgtgcccgagctgtggaacttcaggaaaggccgaaaggcgacaatgaaggaggtgctcaagtacatctttggacagatagagacaaccagcaagcgcaggaggccgtgaagttcgtccttcgatggatgaagaagctgacaggcaagcgaaggatggtttgaggtgctgggtattggtgctaggtatcaagagctgctgccttctgttatcatctcaggtcaggttggaggcgctggtcaattgatgggtctaagttgatgaatactagtgtattgatcaatggatgcccataaggctgtgccaatccttagttataatgattatggttatggtcagtgtcaggctgtagaaataatcctgtgttgtgtccctttgaattgtagaataatcgtctgtaataatttcgatatactttcgtggtccaagacatcataaatctaagtgattagctactaatttttctgtga

SEQ ID NO: 895 - DNA, 3745 bp, Oryza sativa
  source 1..3745: mol_type = genomic DNA
actcgcaaggaaatcaaatgggaaggtcaaacagctggaaaaacagtgtctggagaagttctgtacaaatgtgttattgttcaagacctcagtatttctgttggtgcgacagtcacaacagaggatgattcaggagaaaccatcatgtgttttgttgagtatatgtatgagaaacttgatggtaaaaatatgattcatgggataattctgcaagaaggttcacagactgttcttggcaatgctgcaaatgatagagaggttttcttgactaatgactgtttagaatttgaagcaagtgacatcaaagagttggtgactgttaatatccaatcactgccttggggccacaagtacagaaaagagaattctgaagctaagagaattgaaaaggccaaggcagaggagaggaaaaggaagggcctgccagtggaatatatttgcaaaagcttatactggcctgagaaaggtggattcttctcccttccgtatgataaaattggaaatggcacaggcatctgtagctcctgtgagagaaaaccagttggcaatgaattcaagttactttctgagagcagctttgtctttgagaatattacgtataacatccatgactttctgtatatcaggcctgaatttttctcccaaggggagggccatgagacctacaaggctggaaggaatgtgggtctaaaaccttatgcagtctgccatctgctgagtgttcatggtcctgctggatcaaggaaagctaatccagaatcgacaaaagtgaaagtaagaaggttttaccgacctgatgacatttcatcaacaaaagcctactcatcagacatccgagaggtttgccttttttccatcatctgcatcattggcaatactgtgatttcacctaaacctatcttttttggcctttggtatttgattgttgtgtactttgtgatttgatccaggtgtactacagtgaagatataataagtgtacctgtggtgatgatagagggaaaatgtgaggttcgactgaaggatgaccttccaaattcagatcttccagcggtggttgaacatgtcttttgttgtgaatatttatatgatcctgctaatggagctctcaaacaggtcagctactgccaaatttttcttcagaatccctagttatctgcattgtttccactgggagatgtctttgtattattgaccgagcttgtcttgcatgatctttaaccagctaccgcccaatgttagacttgtgacactgacaaggaaggtacctgcttcaaaaaagaacaaaggaaagcaaatttgtgacattgagctaggtggttcagacaaaccaaaggatgggcaatcagagaactgtcttgcaacacttgacatttttgctggttgtggaggtttatctgaaggattgcagcgatcaggtatgctttgctcatgtagatgttgcttcataggaacattttgactccagttaccttctgaccattggattgtacaggattgtcacttactaaatgggctattgaatatgaagaacctgctggggatgcatttggtgaaaaccatccagaagctgcagtatttgtcgaaaactgcaatgtgattctgaagtacgccatttttgtttaccctctttgatatgcttatcatgtatatgtaaattgtatcttcagcacgtatctctatacgatcatgcagggcaattatggacaagtgtggtgattctgatgattgcatctccacttctgaggctgctgaacgagcagctaaactttctgaggacaagattaagaatctgcccgtgcctggcgaagtagaattcataaatggtggccctccgtgtcaggtcagttgctatgtggcttttgcctgtataccagggagctcctaacaacacattcgacattgcaagccaattgcttgaccttttgacctatccttttttagggtttttctgggatgaacagattcaatcaaagtccctggagcaaagtccagtgcgagatgatcttagcattcctgtcatttgcggagtatttccgtcctagattctttctcttagaaaatgttaggaactttgtctcgttcaacaaaggacagaccttcagattgacactggcatcactcctggagatgggataccaggtgcttgacacttcctcttcacttgtgcttgtgctatagcatttccatttctgtatacattctaaccttgtttacatgttcttaggtccgatttggaattttagaggcaggggcttatggtgttgcgcagtccaggaaaagggcattcatttgggccgctgcacctggagagactcttccagagtggcctgaaccaatgcacgtctttgctagccctgagctgaaaataactctacctgatggcaagttctacgccgctgtcaagagcaccgctgcaggagcccctttccgctcaattacagttcgagatacaattggggatctaccagctgtggaaaatggcgccggcaaaccaacaattcaggtataccctacatatcgcactagcttcactcgccaagttctcctgttcttaagctgccgctttatgtcagttgaataaactttgtatgatgtgctacagtacggaagcggtcctgtgtcttggttccagaagaagattagaagcgacatggcttcactgaatgaccacatatctaaagagatgaatgagctgaacctcataagatgcaagcacattccaaagcgcccaggttgcgactggcatgacctgccagatgaaaaggtactaacatttggccctctaattaacttctcctgcctcctgttttatttttaaactctgtaaacaccaattactgttcattgactgtgcaagtacaggtgaagctgtccacagggcagatggtggacttgatcccttggtgcttgcccaacacagccaaaaggcacaatcagtggaaaggactgtacggtaggttggactgggagggcaatttccccacttctgtaacggatcctcagccaatggggaaggtcggcatgtgcttccatcctgagcaggacaggatcattactgtccgtgaatgtgctcgatcccaggtacacataccaattttcacaccccatacattcactgctgcaacaggttaatgatgcttaactaatcatcaagtcattgactaacccaaacaaacaaattttcaggaagttttatccttcaaagtaaatttagtactacattttgtctcaatcagcactgtagcagtagatttagttctttaaccataaatcaatggatatattgtcatctctcttttcggcagaactgctttgtccattccttcttgaacctgttcaaacatgcattcattctaccgagatgccattattgcatctgcaactttgttgccctttttctgaatcttctgatctgtttctgaatcttctgatctgttcctacatgacactgtcaccattgtatgcacgcagggcttccccgatagctaccgtttcgctggcaacatccagaacaagcacaggcagatcgggaatgccgtgccaccgccccttgcctatgccctcgggaggaagctcaagcaagccatcgacgccaagcgttgagtggcttttaacttcactgcatcgccctcattttttggtcggtccaaataggtttaactaagcattacagttttctatattttgtgagcaattggactcctaaaattaattctgggatggttacatggattaccttttgt

SEQ ID NO: 896 - DNA, 3141 bp, Oryza sativa
  source 1..3141: mol_type = genomic DNA
ctccttggcaagcttgatagccacaatgacaagcacctgttattaaatccaaatggatacatttctgaattgcctgagaagctgattgaaaatgcaatggagtttctaaaatccaaaagaaatgagaaaggtcgttatgacattaaagagaaagagctaatgaagttactgaaagtcaagtacatatctagtcttgtagatcctggggaagctgttggtgtggttgctgctcaatccataggagaaccatcaacacagatgacgtaagatcttctatagactttctctctgtggtttttgattcactatgtattccaagtatgtacttggtgtattctagataggttatttatgtatccagtgcctggttagtttcttgagaaaaaaacagttttggctactttttgaaccatagtctaagtaaaatataatgactatacataccacagaatgcatagatatttctgtgatggtacttgattatgagaactaaaatgagctatatctaaaaattagtttgtgtgccaagattaaatgaagatgagatatataaaaaaaagctagatttgtagctaatctctcggaaaatatacacgttatttcaaatttctttgaactaatttttgtttgaccaaaggccacccaataggcatcttccattgttgctgtagtgactacactttatttgatcattcgtctttattacgctcttatctaagaacttgttcaacatttctgtgataagatgactaactttgtttgcctcgccccttcaggctcaacacttttcatctcgctggacggggtgagatgaatgttacgcttggtattcctcgtttgaaagaacttctaatgactgcatcggctaaaattagtacaccttttatgaagtgtcctctgcttgaagataagacttggtgagctttatttgttttttactttgaagatggctcatgctagtattctcttaggttgatttatgtaatttacgtgagtctgtacacatgtttcctgcatttctcattgcctgctgaatatgatacggggcaaatagagatcttgatcaaactatacttaaacttttgcaccacactagcatgatataaagggactaattttctgcatatagggatgatgatgaagaagaaatggatgataaattaaagaaggcccgtgatgctgaacgattggctgctaaattaaggacgattgatgatgctgaacgaattgctgctaaattaaggagggttcgtgtagctgacattgtagagagaattgaagtatgcacagttccttttcacaacaataatggttgtgtttcaaccctgtataagttacagttgaaactctacccacaagggctatatccacgtcagtcagaacttacagtagaagagtgccatgaaaccttgagaactgtttttattgatgcaatggatcttgctatcagcaaacatttagatttgctacacaaaattaatgagatccaggcagttaagtcaaatgatatggagagtcaacggtctgatggagtcgaagaatctgaaaatggacctactgatgaagacaatggtgtgagcgatggtgaaaatgaggatgatttgggagctgatgcagaaaaatggaaacggcaagagatagatgagatggagtatgatgatgatgctgaaaaggaagagggttttgatatggatagtgaatctgaagaagataccaaatctaaacctgagagtgaagatcatcaagcaaaattagatgaagagttagaagagtctgaggaaggacatgtgctagattctagcaacaagggggaaaatttaaaagctaagcaagcaacagccagactcgaagatgaaatgaatgaagctgaggatgaaaaggcgcaagtgaccataaagttcaagaaaaacataaaatggactattcattatgaatcaacaggtttaaattttgaggttcactacgctttgcaagagcaacctcatattctgttagcccaggtacttctttatatacagtacaacttacattttgcacctcacattgtaacataggttgaatcatcttaatagttcgccctgtgcatataattatgctttgctttgtactatattgatggcttgtttgaatttcttttccagattgctcagagaacagctaggtctgtttttgtcaaggcctgtaagaatattgatcgatgtgaagtgaataaaccaaagaagatagataataatacgataaatactcccatcactctacaaacagcaggggtgaactttgaagtattccataagttagtggactatctcgatatcaatgaggtcagatccaatgatatacacgctatgttgaacacatatggggtagaggctgcaagggcaaccatcattggggaagtgaagggcgtattcggtgcttatggtatccatgttgacatgaggcatctgaacttgattgcggatttcatgaccttcgacggcggttaccgaccgatgagcaggctagggatgggccagttcagcacctcgccatttggtaagatgacttttgagacggcaaccaagtttattgtggaagcagcttctcatggagagtctgacacactggacggcccttcggcaagcgtctgtctggggaaacctgttaaggtggggacgggttcctttggcttgctgcagaatttttccctggagcaacctgttgcgatgtaagcatacatgtagcatcatcagcctgtttgctttactggattagtccaattttgatggaggctgccatagagcagtaggaatgtgttacatatacggtactttttgctagcaagtgcagcaagttatgtcagttctcagttgtgtttgtgtagcaggaaacgaacatgtgaacactgatactccctttggtagtagtatggacattagtctctgtgtagactgtgtggagtatcaggctggcagcagcagtagcagcatgatcttggtttctttgccattttagatgcatttcagcacccttgttttttctgcctttaaacccaaatccgatagccactttgccgttgctgtctgcatgaggttaagatggcagctgagggggaatatatctaggactccagctgcaatatcttttctataattgagtgtg

SEQ ID NO: 897 - DNA, 7888 bp, Oryza sativa
  source 1..7888: mol_type = genomic DNA
taaatttgaagtgcaacttgcaccttcttaccaaggaagtactgcttgtccgccgaaatgggaatcttatttttgttcggaaggcaaaccagttagaaattggtgatattgcttatagactattgcaggatggtgatcttgttttggtaaataggccaccttcagttcatcaacattctctgattgccctatctgcaaaacttctgtcaactcagtcagctgtgtcaattaatccactatgttgtgatcctttcaagggagactttgatggggactgtttgcatggatatattcctcaatgtctgcaatcaagaattgagcttgaagaactagttggtttaagtggccaactcttgaatcaacaagatgggcgaagtttggtgtcattaacacatgactctctagctgctgcacatcagttaacaaatgcagatgttttcttggagaaagctgaatttcaacagcttcagatgttatcctcttccatctcattgacaccaatgccatcagtttttaaatctacaaactctcaaggtcctctttggactggtaagcaactgtttggaatgctgctaccttatggtatgaatatcagttttgatcagaagttacacataaaagacagtgaagtgcttacctgctcatcaggatctttttggttacagaataacacatccagccttttctctgtcatgttcaaagagtatggttgtaaggctcttgagttcctttcttccacccaggatgtactatgtgaattcttaaccatgtggggtttaagtgtctccctttcagatctctatctgttctcagaccattactcaaggagaaaactgagtgaggaagttcatctggcattggatgaagcggaagaggcttttcaaatcaagcaaatattgctaaattcagtatctataccaaatctgaagtattatgatggaggtgatgatagatcaaacactgatgaacaatctggttttactcaagtcagtctgccaatcatcagatcttcaatgacatcatttaagagtgtcttcaatgatctgttgaagatggtgcagcagtatgtgagtaaagataattcaatgatgacaatgattaactctggaagtaaaggtagtgttctgaagtttgttcaacagactgcatgtgttggtcttcaactaccagcaagtaaatttccctttagaattccctcacaactatcatgtgtttcctggaatagacataaatctctcaattgtgaaatcactgacggcaccagtgaatgtgtgggaggccaagacatgtatgctgttgttagaaattcttttcttgatggactaaatccgttagaatgtctactgcatgccatatctggcagggcaaatttctttagcgaaaatgctgacgttcctgggactttgacaaggaaactaatgtatcacttgagagatacatacgttgcttatgatgggactgttagaagttcttatgggcagcaaatagtgcggttttcttatgatactgctgatggcatgtacagtgatcatgatcttgaaggtgaacctggggcccctgttggctcttgggctgcttgttccatttcagaagctgcctatggagctttggatcacccagttaacagtttagaggattcccctcttatgaacttgcaggttatattcttctggtttgctctttaatggtcttttgttgtcatttttattcatctttccttttgacaatatttgaactttggcactttgctgtgcaggaagttttgaagtgccacaagggcacaaattctctggatcatactggtttgcttttcctgtcaaagcatctaaggaaatatagatatggttttgagtatgcatcactagaagttaaggatcatctagaacgagtggacttttctgatatggttgacacggtcattattttgttagtatatttaatctgtggctttcttcaccttttaatattgttcattttagtaaaaatttcatgtcttctttcattttcatatttagatatggcggctcagatatgcagaaaacaaaaggaaatccttggatcactcattttcatttaaaccaggtcttgttcttttgaagtaaaatggtcatgatttcatagggacattgggttggtatctaaatgtctgttcaaatttgtatatatgtgtaggaaacaatgaagataaaaaggttaggactggaatttattgtaagagagattattgaccaatacaacaccttaagaaaacagttgaacaatgcgatcccttcagtttctatttcgaacaggtaactgcagaaactatttgtgctatgcatgattatcgtgtccatcaactgcctccctgttttccttacctgaaaaagaagcagcaaagtacagaagtacctgatcttctcctaaatgctcaagttactaattgagcttacactgagaaaaattctgggcatgtgtattatatttatttggcatattgtatggtactacctctgtcccaaaatataacaacttttggctatgaatctggacaagtaattacttggtcaaaagcattaatttataatagtgcatgcttcatttcttttgttaagacataaacctgcatgattcaaaaggggaaaaaggatatgtgcttatatgggtatctattattatattattgaaacagtataaatcagccttgcatgcaaaacaacgtcagcatcaattggatgtatatatgtactattatagtgttgagtgcagaatattattctactctctgactgaacctacctaggcatccattcatgccccgatacagatcaagaaaaattacccactggatcatttggtttttacttgagtaaaaactgagcttttttgcatcccccccaaaaagagcacttttactcactgattcatgttatttttactgatttatggagcaagggcatcttttgagaacattatcctatacctcataaaaaacggttactttgtgaatggctaagggtgggttgtgaagttagcttgtgggtttgaatcctgtttcgcaaattaaattacagtaatttttcgcagatgttttcaattatctgtagtgaaactcttcacttgaagatggaaaataaatctgggaagctagggaaaaacctgggcacgggtaggtggtgtgtgtgagtaaaatcctagtgcaaaaatagtaaaacatatctggaagtggaaagcaaaatccgtgacctaatataaagctattctaaacataggagtacaaatgtacagtgtgctactctgtgtgtgtgtgtgtgtttacatattgaatactgctatatttcaattctgcgaggaactcggctagttattacacatctacccagcaagaataaatcaaaatattaaactttagggtaaaacgaaccggtgataccacaatttgtgaagtggattctagtttgtcggtcatcttacaagttgatcaaacaagtccccaacttgattgctgagtgcaaatcgagtcaaacacacaccacataagctaattacgctgacaatagatgctagcgtagtgtgagactgtgagtgccagcagcatgtgatccacggacccaaaggtatgggtgttatttttgcatactcaaaaagaagtcaaaggaacatggtgctcctctcttctattgaatggtctgttgtcctcccgccactctgcactatacatcaaacactgccttcttgttcaagcaggctgtggattatgtgctgcttacatggcaccctcaggttaggctggtgttggtgttgctgaaagtaaccccccatggcattgttttgaacttgatttgcaagttgcgaccacactaatcaagttgtgtgactagctgatcagtttgtgaaaggagcgactaacttgcattttactctggagtttttttcccccatctagtattttctatttcattaatttattagggtaacttacagaaaataaaataagttcaggataataattctagatacatcagtgctgtttctgtacattgatggggaatcccacataagtaacaacccaaacaaacaatcatacacaagtgttattaatattttacttactgaaattccttcaatagcattgttgtctatatttaaattgcactatctgtttacctccagctattgctgcgctgcctgagtaacatttacgcataaattctttcatctaatatatcaataagtaaatgtgacctgtccatgaagctcaaacaactatatttgttttagcacaaggcatcgcagctgattctagaattatgtgtgcatatacatgtttcatgctgttatgcctgtagctatcctattctctttctagttcccatgggccatgacatatcatttggcattctataccctgcagcaaatgttctgtaggcaatgagtgtgtcaagaatcagacctgttgcgtcactatggtagtacaggtggaaattaactccatgtcgcaattggacgttatcaaggaacgggtgattccaagcatcctggccacactgttgaaaggttattatgttttgatggattttttccccaaaaaatcttctcaatgttctagggaactcctcagtaggatcaaaatccaagtttgtcactaataggtcaatagccatctaactacagaagaaagtgtttcatgcaaatgtactacttgttgtatgctagatataccaagtttatgcatagctctgagttattttaatactctttcaaaggccattcttgttgtaataacttcacatatcattatattattgtttcacaaatatgagaaaaaggtatcataaaatgtataaaggggcttttatgactgattatttggttgatttggttagcaaaagtaagtctagttctaactcgcagaacccattgtccattgatccactcacatgatagaactcaagctattgcgtgatctttttagactgaaaacacattatattgaatgagtagtcaaaacaaaatatatgagttggcttctctgggttcaccatgggggctatgcttttcaaattatagttcatcatacttgctgctggtgcactagtatgcagataaattttgatgtacgctgcttgatttcctctgtttgcaggatttttggaatttaagaatgttaaggtgcaatgtcaagaggataatgaacttgttctgaaagtcggtatgtctgagcattgcaagagtgggaagttctgggctaccctacaaaatgcttgcatcccaataatggagttgattgattgggagcggagccgaccagagagagtatatgataatttctgctcatatggcatagactcagcatggaaattctttgtcgaagtatgatacttgctacccttcattctggcttcactgtttcattcattcctgtgtaaaatggtttcaaagtttaattgtttgtgataaatttctcctgtaggtttataacattttcattttcacttgctttttcagtctttaagatccacaacagatgctattggaaggaatatccatcgacagcacttactggttgtggcagactgcctatctgtgagtgggcagttccatgggctaagcagtcaaggtttaaagcagcaaaggacttggttatcaatctcctctccattttctgaagcatgcttttctgtgagaaatcttagctttcttactgattattaactatgagatttcccttttgaaatgttctgaacatcttctgattttatggcttttcctgcagaggcctgcacacagttttataaatgctgcaaagcgagattcagtggacaatctttctggtactctagatgcaattgcctggggcaaagaaccttgtgcagggtcgtcaggtcctttcaagattctatattctgggaaggtgtgtattgtaacttccctgctgaatcaagcactactcttttagagtaactttaacgtgctcccaaaatgaaaagaaaattgagatcttgatcaatcaccccctatgaatactcacgatgcattatacatgcacaatttaactctttggatagcataaaggtacaatactaaatttctttcctaatgctttgcctacgagcctctaatgggctgcaagctagagaaatttgcattgagtaagtattcactgaaataatttgttttctggttctgaataattgatataaaatgaagtgaagatcttatattatctctatgatgttcatattatttatgctgagctgttgattgatgatattccgttacattaattttgtacagaaattgaatcgcagtgcctgcttctgtgatagatggatgttcagatatttcaaattggctgctaacatttattcttttttgcagtcacatgagacaaaacaaaatgagcacatatatgactttctacataaccctgaagttcaggctcttgaaaagaatgtaatggatacctacagaaaaaggactgaaaaaacttccaagcggagatcagcactcaattctgaaggcaatgctaccatcaatggtggtgccatatcttttaatcagaagtttcttaatgctaaagttggtatatgggagaacatcattgacatgcgcacttccttgcaaaacatgcttcgggagtatgttataccactatccatggaatcgtgactgatagttattttcttttttaaaaaaaaagctttataatccttggtattgatgtcatcttctactttcatgaaggtacacattaaatgaagttgtcacagaacaagataaatcatgcttaatggaggccttgaaatttcatcccagagggtatgacaagattggtgtgggaataagagaaatcaaggtaggtacatagaatgcaattttcctttatggcatagccctcgtcttttctataatcctacaaatatcaattgaaattttcattgatcacaaaccgcattaatattttctctaatggctcaaagaataagaatatttttcttcatgcttatgtatgttatattctcggttttaacatgcaagtgccggtagtgaactgtccaattaacgtggtaggtttgggggttgtgctcatataattcggaattagggtactattattgtaatatttccaagcactgttaacttcttgatgttgaagaaagataatacctcccccccacgctgactgcacaatttatgtcgagcttgctgttagcactgatgaattcctgctttataaccattgctttttttatacgtgatatcaaaagcatcccgcgttatgattattcttcattctagcatgttctgatcaaaacatatgttgtgtgccacatacagatcggagtgaatcctggtcacccgagctcaaggtgcttcattgtactaaggaatgatgatactactgcagacttctcttacaacaagtgtgtccttggtgctgcaaattctatctcacctgaacttggaagttatatagagaacagacgatctaatagagcagttcggccacatcagttgtagggtgagcccgtcaatgctttacgaacaagtatcagaagcaattttcatggataacgatagattggcgaatgttgcttcttggctgcttcggttaacggggatggcagggtcttacactctacagggatgtgtgtcaactcaactcaactcactcgagctacagatggccgacctgagccttagtgtaggtttcatgccttcacttctgtagcacatacatctatagtaacccttaagtttgtttggacaagaggtagtggcacaaagtgcaataggtgtcgtcgttatccttgcatcaattgtatgcggaaatgatccatattctaaatgagaatcacaaaattttggtcgttgaatttaatctagaatgtgatttattcgtgaa

SEQ ID NO: 898 - DNA, 13143 bp, Oryza sativa
  source 1..13143: mol_type = genomic DNA
aagtcttagtgtttttcaaatttggccgttcttgctgccctgttacagaaaacagagcaatagccatatctccggaacaagcattagtatttttcaaggcttagtataatttgaaaaatactaaggcttgttcttgtcaaatttgtctgttccaaatttggttatcaacataaataacaaaaaagagtgatacaaacccttaatcttataaggcttgttcaggagatattcttgtaacaggattgcgactgcgctatagcaaccgaaggcacaaaaaactgttttgtgctggtttgtaactgcaagagagccaaacaaggccataaacgaaataccagtacaatggtcatcaataaggagcttttagccttactaattggaactattcgttcatatagaagacaaagattataggagagaaacattgttggccggttaacaatgcctcaaaacgactcttggcaccagtaaaataaaaagcactttgccatatatgatgataaagagaatacttgttgatactaagggtgtgttcggaacccagagttcccaattcacccctctctttttccgcgtgcacgtttttcaaactactaaacgatgtgtttttttgcaaaaaagtttttatacaaaagttgcttaaaaaaaccatattgatctatttttgaaaaaaaataataaatacttaattaatcacgcgctaatggactggtctgttttctgtgcggggagtttagttcccaactccccatatccgaacagggctgtgtttgaggagaaggagatagagaagattgggaagatacgcaaaatgaggtgagccattatcgcatgattaattgattattaactattttaaacttgaaaaatggattaatatgattttttaagcagctttctataattttttttttgcaaaacacacaccgtttagtagtttgggaagcgtgcgcgcggaaaacgaaacaaactcacacacaatcacccaggaaagaacacagataaatatattttttaaagatatatacaagatatgagaaaataaattgttgctacggttaaatggttcaacaacgatctttagcatatataaaataaacacttttgttgtataagggtgtaaacgaaagaaaaataccaatttttttaatggttagagtcatgattggcttaggtactgtgagagtctcttgtataactctgtgtgggggctgtatatttaaacatgcctttaactgttgaagattttttttagggaaaaaagggaaaaaaatttttaggggatttttttagggaaaaaggaaaaaaaatattttttaggggaaaaaaaaggtgatgatatgaagaagaatcgaacccgcgactcctctgttacataaaacggaacaagccaacccgtcgatccccaacatacggctaagatacgggaataaaattaattaaacaatgtagatactcgccctacctatttatttcctccaagccgaaaaaagcgaagtcatctagggtcccgcgccgccgccaactctcccccgttcctcccctttccgcgcgagcggcgagccggcgggcggcggctgtcggaggttcgcctcgcctcgcctcctctcccgcgccgccggcgagaaggcccgtaggtgcgttgtgtacggtttcctctccttctccacctcgccctagcctcctctctctctccctctccctcgccctaagcccctacaaaaccccagctccattccccattgctaccgtcacctctccctctccccttcctactctgcctcctccgccaggttttcacgatccgaagcggctccggctcgcgaacggcggcgtcgagcggagcccagtcgggaggggagatggcgcggccggaggagaagctgcggtgcacgaaggagcccttcatcgaggatgtcggcacgcggaggatgtaaggccccgtcggtccggcgtgttttcatcgtcgtcgtcgtcgtcgcgctgcggttgtgtttactgacttttggttttgttttctgattcgatttgaaccaatccggttcagaaagagcatccggttcagcatgttctcggggaacgaggtgcgccaatccgcggaggtgcaggtttggaacagccggatctacaaccatgagatgaagccggtgcccaatggattgctcgacacgcggatggtaaatgcgtgttgcccttcgagtttctcattgattgcagatgtttgagcaaatgtggtttcatttgcttcatcataggaaggcagctgggctatgctttccggatcctgtttcatggttcattgttgttcttttttatacaacatttcatataatttcagggtgcggcaaacaagcttggggagtgcagtacttgccatggttcatttgctgaatgcccgggtcattttggttacttgaagctcgcccttccagtttttaatgttggattctttaactgtattttggatgtattgaagtgcatctgcaaggtatcactgcacgaataagattagatgttttgtctaaatccaccaaatgtgattattcttatacttgttccataatttatttaaagagctgcagcagggttcttcttatggagaaagatcggctagagtttttgaagaaaatgagaaatcccaaagcagatccgctacagaaaagtgctatcatgaaaaaagtgagggacaaatgcaaactatcccgttgcccctggtgtggattcataaatggcaagctactttctgatactcctttttatcctcggctcctcgccacttaaattttccttaggatggcttactaatggtcacctgactgctgtcaacattttacagaacatttctcacttttgcgtttctttggttggtagtacaggtgttgctaaaaagggcagagcagggttgattattcttcatgattgtagcaaaacattggatggaagcacagaagagcttcgggacgcactatcacataagaaagagaaactatctattagtgctgttcgcatgctagaccctgcaattgttctatctcttttcaaaagaatgaccgatgaggtagatcctatttttttgtctttcaagattactattttatgagagtaccacaatttgtattgtacagactacagatttgttcgattagttttatgtatgttttctctcactttgatattatgcactctacaggattgtgagttgctaaacctcggtgataggcctgagaaacttattgtgacagagattgcagtgccacctgtacctatacgtccttctgttttcgtggctggtggaagaatgaggtttgctcttcagttttttagtacctatatgtcaaatggtgattcagcataaccacattttccttttaatgcattgaattgtcttgcttcccacagcaatgaagatagcattaccgtcatattgaagagtattgctaatactaattccatccttaaggagaaccttcaaactggtggtcagttcatgaagtgctttgtaagacactcacagctcttcgtttgtttattttctcccatttttttctcttagtgcagtgcaacttctgtatgtttagaattcctttcggatagtttgctagaaactcagaaatcaccttgtctctgtatcttcatgaaacacacagcttgatagacccataatctagtttagggttaatctcaatttgtctgtatggaacctacaaggcaaaatatttaggaaacttgatgatttacacaagtagaaaatatgaaagccagaaatcatattctaacaggattgattattctgtagtaagtcagattgtgactttcctttgatatgcagaattcatgtgggggctggtgtcttatcagcatgacaggttcaaagtattacagttttgaaaatccgacttaagtgtgacaaaatgcttattcctatttagctaactaaattactaagtcagtaactactgtttcaagagaaaaatgcactcgtctctatgaaggaaaacaaccatttagatcattcaaaattgtgttttttatgactctttcacaagagttcctctggtgctatgctatcaaaatattctgactgtacgatatgcattctaacaatttgatattactttaaatgattacatctacttcttttcaatctttgaaggattgctggcaacaccttcaacttcaagttgttgaatatatcaacagtgacgcaccctctcttcccgagtcacaacatcgaggccttgttcagcgactcaaagggaagacaggccgatttcgtggtaacttgtctggaaaacgtaccgagtacactggaaggactgtcatttctcctgatccaaacttgagaataacagaggtacatggcaatatagaagttttttatgttcacttccttgttgatgtttaacgtcatcattaattaacacttcaggtggctattcccatcctgatggctcgagttttgacttatcctgaaagagtttcatactataacatagagaagctgcgtcagtgtatacggaatggtccacacaaacatccaggggcaaatttcatcatacaacctgatggaacaaagctgtaagtcatatcagtaaatgcactgaaattagttataagttcagcgtatatactcaattatcctacatttttaggcacttaaagtattgcgatagaagaattgctgctcgagatttgaagtatggctgtgtagtcgaaaggcatttagaagatggagacattgtcctcttcaatagacaaccgagcttgcatagaatgtcaattatgtctcacagggtataaattgctcttcattacactgcacccgctacatgaaaatgttacctcatattggtcccttgctctttgtatttaatcacaggctaggattatgccctggagaacactaaggtttaacgagtctgtctgtaacccatataatgctgattttgatggcgatgagatgaatttgcatgttcctcagactgaggaagcccgcactgaagcgcttatgctcatgggggtagcatttgctaactctttctttttacagttgaccatctttttttttttttgatgttctaccactattctgtagctaatattcaaaatcattaatacttttgcaggttcagaacaatttatgtaccccaaagaatggggaaatactggttgcatccacgcaagactttttgacttcctcttttctggttacaagaaaagataacttttatgacaggtcgtcattttctctcttatgttcatatcttggtgatgcaatggaaaacattgatttgccaacacctgctctgattaaggtaaggctttttcataggaacgcactttgcaagtatcagattgaagacatgctatttcttaatgcttcaaccaatgtttgtcattaataggagatattatttgggcatgggggacagcatgccatcacttttatttgacttcgacagtattatcaaactggattactttgtcatataagttttagtaatttttgtagtgaatttcagcattattatgcataacaagaggcagtaccttgtctcttttccagctgcgcctttgtgcatcttagctttctcatcaaattcctgatttctctgtatactgattcagtgattatgttctccttgtacagcctattgagctttggactggtaaacaactcttcagtgtgttagtacgtcctaacgcatgtacaaaggtgtttctgaatcttactgttaaagagaaaatttataagactcctaagggttcaactctggaacctgaagcaatgtgtcccaatgatggttttgtctacttccgaaacagtgaacttctatctgggcaagttgggaaggccactttaggtgagaatcccacccagtactgattcatagctaaaacgactgccaacctgataatcctaagtactcactctgtcccaaaaatataggtacctctctaatctgagctagaaaggcagctatattttgggatggaggagtatgctatattctctttaggagaacattagtttataggcatggactataaacaatagtcctggcatggtttaccctcttatgaatcaccacatacaataaatgttcctttaatcaggtttggaaaatgtattgttcacttgtgctagttagttgtccttgttattttcatcctgcttgttaaatttggaagcaaaccaaaacaatctttaatcttttgtttccaggtaatgggaataaggatggcatgttctccactcttgtaagagattataattctcatgctgcggcaagctgtatgaaccgcttggcaaaatttaggtgagctacaaaattgcgtaatggacccattctttcctaaatattaactaacaaatgctatgcaattatttttttgttctgtctttgttccattaaagaatgcgagagggttaatagaaatcactaataagtcaaacactctgccttctttttattttattttacgtgaatctgccatcttttttatttgtacgcaaaccactttgccatttgacactaattaagtcagggagcttagttggtgtacactcgttcaattttatctctctattattaccattttgctgagtttctcatttgtattgttggtgttagattgttacataatttagtgcacatttttttttctgatttgaattgcattcatcttttcctgcagtgcaagatttatagggaaccatggtttctcaattggtgtggacgatgtccaaccgggagaacatttaaaccaagagaagaaaatgaaaatagatggagggtacaaagattgccatgatcttattgcttcctattccaaaggtgcactccgtttgcagcccggttgcaacgcagcccaaacattggagcaaagtataactcgtgtactgaatgaaatcagagaagaagctggaaaagtatgtttcatccaattttattgtctttctgaatttccttagccagtaagcctgtcaatattttgttaatttaatccattgttgtacttttgcatattctttacagatagaaaaatatttttagccttgcatttcatattattttccagtgagcaaatctttgaattttcctgaaccaaattttgttgcatggatattctcatcatgagtctgatttttagcgtgattttgacttctactggagacccgatgcaattattttgttgactcaaaacaaaattattcaaatttgattttgcactttttttattgaatgcacttaaacttatttatcaggtctgtatgaatacacttcactggaggaacagcccattgatcatgtctcagtgtggatctaaaggttctccaatcaacattagtcagatggttgcatgtgttggccaacaatcagttggagggcgtcgtgccccgaatggcttcatagatcgaactcttccccactttcctataaattcaaagactcctgcagtaagaacatcagtactagaaatatgacttgcttatttgtgtatccatttctggtgctggatatttctagttctgttcaaataagtactcttcaaattttatggggcactatacatagagatagaggctggaaattgaaaatatatgtaatgttttattttaaacacaatatctcttatgttatagaaagttctgaattgacattacttccctttgatgtatatatatgtggtatcctaaatggctaattaattatttatttttcattaaaggatcgtgggattctattggaagttatcatgtagaaaaattggtccttttcagagtggggatttcgttgactcgtagtcctccacctagctttgttagagaaaacatttttttattcaacttgttctgactgcaattttgtttgaattaaaggtcacgaaatcagcacattttggtatattcacatacaaatatgttttgtattccatttccaggccaaaggctttgtcgctaattctttctatactggcttgactgccaccgaattcttcttccatacgatgggtgggcgagaaggtcttgttgatacagcggtatgtctatgtataaaaccatctattgtttgcataagttgatatttgcactctatctgtatttcagcacaaaaatttcttaaatttgctcacatagacttacaccgcagtacatactactcaattgaattaatagtagtacaatgatgatattatgtgagaggaatagtctgaattagctccttgtgcctggcagggataggattaggaaacttagcagctattatagaagagcacatcatcaactagaaacaaatgataagttcattcatcacattcttatagaattaagcccacttctcctttatattttgagcacagcaatgattggggaagatgtttccttgttcgttgtttgggcactaaatcaacttgcttgcataccagagttgaatctggcgtttccgtttgactctgccttttaggctttggtccttgcagttgagtgttttatctcaggcactgtagttcgctgcatgaaaaccttcacagcactatgccagttctatgtagaggtctgttaggtgaactatactggtatcttgtgcattcagctggaccaaggtgcaacccattgggcatttccagcatactcattgtgccttctggcttctcaaaaacatttgggaattgttggaaatttggaatataatttctgcttgtttccttggttgtgaacttgtgatcgtaggttaaaacagctgaaacaggatatatgtcccgcagattaatgaagggattggaagatctctcagttttctatgatcagacggtccgcaatgctagtggtggtattgtacagttcctctatggagatgatggcatggatcctgcaaagatggaagggaaagatggaaagcccttaaatttggatcaattgtttatgaaagtcatggtcagttttaacatgtaaaaacagtttgtttacttgatcaagtgagatgcgcctcgtgtgctaaccattttactgttgtaggccacttgtcctcaaaggggacagaatacattatctccaggtgaaatcttacaaattttaaatgacaagctctctgaacatgatgcctcctctgatgatggttgtagcgaaaagttcaagcaactgttaacgtattttcttgaggatcgtataaaattgctgaagagcacaaggagagcgcttctcctagatgaagatcatgttggagagaggcactccagctttgaagaatccattgctgctaatatttctggtatatctgtgaagcaactacaggtgtgtctattcatatttttcacataccaattcatctctgttttgcgaaaaacctgaaatatcaagcacagtctatttctgatcaattttttggtctcttactaattgcgtggtcatgctaattttctgcagtaaatgttaaactgatttcaagtattatttttattggtttgcttatgcattttatccttgtgtcgtcattctgtaatggttttccttttctccatatggctcaggttttcttggacacatgtttatctcgttaccacttgaagaaaattgaagccggagcatcaattggggcaattggggctcaaagtattggagagcctggaactcagatgacattgaaaactttccattttgcaggagtagctagcatgagtatcctatatactatatggttcgtgaaagtctgcttttaattttaagaattactagcaggtcgttttggcctatttcctataatttatttactttagaggggcattggaatgtagtatctaagataaagcggatgaaattgtcaataatatgcgctaaaagatataagctttcatcaatctgaattgatttgcacaatactacagcatttgatatcttgatgtagagtaatgcatacatgctattcttggacactgctgttcaaatcatctttccttaacaagtaaaaagatgttactcttggtgttcctcgcatcaaggaaattatcaatgctgctaaaaagataagcacacctattatcactgctgagttactttctgagaaggatgtgttgtctgcacgcattgtgaaaggctctatggaaaaggcagtgctgggtgaggtatgttgcccccaaacttgctttcgatgttgataattgtatcctcttgtattttacatcattacacgcacttaaaacttacaagaagtcagtctgctttacatcttcatctatgtttcttaaatacattaaaatcatgacatgcatttaatacacttcaaagatattagccatttgatatttgtctacgcatcaagctagtggcatcatatttaccaggttattcaatttacagaaatgaaaagctctgcccacaatttataaattttatgaaggagagaactcaaatttaggaatttcacggtgttactttgcccttaacttttggatgtatggatggtctttgtgttgagcaggtggctgaagccataaagattgtgttgaaatcaagtcaaccaaacttggttgttaaactcgatatgcaacgtatagaagccctgcacatgggcatctctgctgactctgtgcagctgtcaatattgaatcatccaaaaataaagctaaaatctgaggtatcaacaaagctctttgatacgcctgaccatcagttttttctgttaatattatttattgtacgtcatctttgcagcatgttcgtgttattgataaatccaagttgagaatttatccagctggaatagataagtccaaacttctatatgagttacatcatctcaaatccatgcttccaaaagtgatcgtgaaggttagcatttatcaagatgtgcagtgttagatgtgccattttggctgtctctgaccttcctactaatcaattcagggtattccaactgttgaaagagctgtgatcagcgaaactggtgaagaaaatgacaaaagatacaagttgttggttgaggggtatgagttcatataatcatatcattcacagttttagcagcatgaactaaagttccgtttgtagatttgctgacccttgttagaattttattgacctatttttgtagatcactagagttccagggtcttgtctcttggaatggcttagtttctgacttactccaacttctgcattatttttctagaatattaatcaaatagttctgtaattgcagaacaaatctcttggcagtaatgggtactccaggagttgatgctatgaaaacaaaaagtaaccacatcatggaagtgaaccgaacactcggaattgaagctgcgaggagatctattattgatgaaattcagtatacaatgaaaagtcatgggatgaacattgattcgagacatatgatgcttctggcagatttgatgacatacaaggtacaataattaacacctaccttcattttattatgctatatttttaatctatgttgtgtacccttcaacagtaacttacatactgctggttcttattctccgagcagggtgaaattcttggcattactagatatggtattgcaaaaatgaaaagtagtgtgctgatgctggcttcgtttgagaaaacagcggagcatctctttaatgcatcatacagtggtcgtgaggatcagatagagggagttagtgaatgcattatcatgggtatacccatgcaacttggcactggtattctcaaagtcagacaaaggtacgaatgattagcttgcaccctttgattgtgctatagcatactatgatggcaaacttgtctttcctgagccactgtactacttacatcagacatggcgaaattacagcttcaccggcagtaacattgttagaacttctggatcaaccagacaaacctcacgttttactgataatacccttttttccttgcaggcttgaccatttgcctgaatttaaatatcagcctgatccaatattggcgtgatacaagctagaagcctagaaccagcttaatttgtctgaagctggaattctgtacagatatatagaggggttggatgtataagcatgtataagcatcatatagcagggcagctacggcaactgtaatttgaggcaagtatgcactgctgaggtagcattggggcaaaactcccttttttctgatagtccaccgtatgtttcagcttattttggtttcaatcccccaggtttattctgtttccagagcaggattagtttaaagttcaaacatatactagctaggtgcagtgtgccacagtttgattagaattgggcccgctcattgaacttttctaaagaaggaaaaaatggtccctggtctaatgtcaaaagcttgagcagaacaaagtaaatatcacgtctctcttttggttcttccgtttctcctgtgtcttcagagcgagcgtagctgtcactccatagacaaccgcttatttttatttttttttctgatttcctcctagctctcacctgtcaacaacacatttgatctgctaatgctgctgctgccgtcatgcaccaacaagagaagatcgcctggaaagtaaggaaagagatcaaggagctcatctagaaggtatgttgatcgcttttgttaacttgttactctcactccacgggtcggtcggcgtgtcgtgtgagatcggtgctgcatcctcacctactctcccctccattcctccccgatctgtcaagatctcgcacgacttcgtcgtcgtttcttcctttgtctgaccgacggaatagcatatgcagaatgcaactgcatatgctctgcaaattgctgcgaatgtactacgctcctgaccgattcacatcagggaggaggaaacgagggttggtacgatggatgagagtccggaatatacattttctgattcttctttcgtcagacgccgacatacatgacccgtcagtaaaggaccctggttccttttgtttgacgtaatgacatgtcgccgaaattaagaggagaggatgaggaagaagccatcttgaaaagtgagaaccgatacgaaatgtgcgttttccggagggtaatttggaaccataccattataattttgtaaagtttaagatatgccatcggtatcttaatgacatgtagaacccacataagtcagttggatgcgtctttttccg

SEQ ID NO: 899 - DNA, 8520 bp, Oryza sativa
  source 1..8520: mol_type = genomic DNA
taaaattaatttctattgattcaacccaatgcgaagtgatttttattagataagaagcgacgaagcatattaatcgatagtaatgattaatttagaatgatggaggttttggtacggcctttgcttaaggggtgatcgaactagcacggaaagaaagtaatcctctgtatacttgtaagtttatccccactaaatatagttattgctatttctcttttctcttattaagccacatcatccgaattatttttagccattggatgatggatttatggttcaaattgtcttttttttcttctctcataacaccatacaatctcaataatttatagactcaaaattcataagtatcaatttgttttagttttaataatcatattgcatcatatttgtatatattatataacttaatttcccgcagcaacgcagcggggtattgatctatttcttatttaaatgtactcgctaggttaaaaaaatatgagcatttctgtacttcctttttttttacggggatggaggtgaaattaaataagacatgatttttactgggattaaggagagaagtgatattaaataagtgatggttttcatggggattaaggaatggtgaaattaaatgagtactgattttcgcagaatttaaagagaggtggaatgaaataagagatgattaattgatatattctaaaataaaattaaaatgccagatggttatattttaggatagaggaaatgaaatattagtaaagtgctcttgataacaaatacaattatacaactttgatgttaaatatttagattatttaaaatataatattggtcccacgtggagtatttacagatttttatactgctttggtaggtaaaactttcagaattgaaaggatggaaattaaacgtcggtaaaaaaaagaagccccacatggagtatttacatttttttactgttttcttctttcaccattgtaattacaacaacaactaaaatacacagtgatgtaggcctcacccttattcacaaagtagatagaacatatggagtaggcaagataccaaagttggatggagagagagagagagtaaaagatgcgtgttgactgttgagtattgagtgagtaaaagagaggcctcctgccttctgagttctgagctttctcaatacttgacacttacactttgggtggctaccggttggttacagttacagaagaggtttgtataacacagtaaaaaccagtagataatacagttcccaaaaaacttcattcctgtgtttgtttggcatctgaggtcgccattgatcgactagcaagctcttgatcttgtccatccataaccatattaaaaaaaaagaaacaaaggtatgttctagggttcttcggttgatatctagttgtttgattctccttttggttggacatgacactgatcatacgaaccatttggtttcagtgattgcatactaacctctgcctccacaggtacagtcgtacagaaatggaaggtcatcctgatccaacatctgctgctactgccatgatccccgaggcctcgatcagacgcatcaacctgagtatcaccagcaacgaggaaattgtaagctgtcaaaccatcatcaccttcacctgccaatggtatttggtatcatattcttttacccattgctgtgactcctgtgtattcggcagctgaaggcgcagccggtgaacgagctcgagaagccgatccccatcacgcatcaaagccagctgctgaacaatccatacttgggcctgcctctgcaagtcggcagctgtcagtcgtgtggcagcaacgccatcgaagaatgcgagggtatgctagtcagtcgcaatctcttttgtgcgatcctgcattggacaataactttcagatttccaaacgggtgcaaatgaaagcaagttttgtgaagttattcactgtttattttgcatggcatgatgtctgaaaatctgtttctggaaaaaaaaaagaaaagatattgcaaagaacagtttcagagacagtgctcactcttcactctgttgtgtacctttgatggaaataaaattcattttttgatgattgattccaaggtcacttcagattcattgagctgcccatgcccatcttccacccgagccatgtcaccgagctgagccagatactcaacttaatatgcctgagatgcctcaagatcaagaacagaaaggtacaactgcaaaaaccatgctcaggcatatcatcagcatatgcgataagccatactatattgtcatcgctaacacatgtttctgcacttaacaactcaaacagaagagcactcttaagggaagcaaattcacttcatgttcacactgtcaggtaatttgcagctgatcatccatttatgtttcttaggggtcaatgttgcttttccctcaactgtgaaaagccaagtaatgcaaacaggcatcattagttcttgaatccatcttattccaggagctcccaccgctgtgcgttgcagaagtcaagaagtccaatggtgcccgtggcttggagttgagagcacctatcaagaaagaactggaagagggattctggagcttccttgatcagtttggcagttgcacgaggggtacctctcattgtcgtcctttgctcccagaagaggtactcttgctcatgttgcgaaagccacccctattggaacaaagcaaagataaatgcataagtttcagaacttacatagagtagctttgcatatagaaattgttgcacacatttatcttactatctgtcccccttcgcattttattcttctgtttgtcaggtccaaaacatcataaagaagatccctgaagaaacaagaaggtggctttctgttaggggatatattcctcaggatggttttatactgagctatctctgcgtcccaccaaactgcctgagggtttccaatgttttggatggaaatacattcagctgttcagtaagttcatcctaatcaaacactatttgattgaagtttagaagttctttttgcctttttcccttctagatgtcattaccactgacctagtgatttatgtcccttctttaatcagggcacatcgacaaacttattaaggaaagcactacgtaagatacagcagattcgtggttcaaggattggttcctcaaacatccaagtggatcaagttgcagatgatcttcaggtcgatgttgccaactacatcaacctcggaggaacaacaaaggtacatgattcattagtaaataaagtgtaggttaccttcttcatcataattgcatcttcataaatttatcatcatcgtatgtctcttgaagggtcacggagatgacacgttcacaagtcaaccaacagcaatgcaatggaagcaaaaaatgaagacattgttcatcagtaagagctcaagcttctcgtcccgtggtgtgattactggtgatccatacattggtctcaatgttgttggggtgcctgaggaagtagcaaagagaatgtcagtagaagaaaaagtcacagaccacaacattgctcaattgcaagacatgatgaataaaggactatgtttgacatatacagatgccaattccatcacgtactcattggatgcagggaaggacaatccgaacaagaaacacaccatactgaaggtcggcgaaattgtcaacagaagggttttcgacggggatattgtcttcctcaacaggccaccaagcactgataagcactcagttgaggccttctatgtccaagtccacaatgatcacaccataaagatcaacccactcatttgtgacccacttggagcagattttgatggtgactgtgtccaaatcttctacccaaggtcgctttcagcaagagctgaagctaaagagctatacactgtggataagcagctggtgagctcccataatgggaaactgaactttcagttcaagaatgatttctcactagctctgaagatcatgtgtggtagggagtattctgagagggaagcaaaccaaattacaaatgcaatgttctcatcagggatgtacccccagaagccactgattggtggaccttactggacctttcctcagattctagagaccactaaatctaatgcaataacactggcagaccatcttgacagagaatctgttggagccttagctactggtaccaccatctcatcgatcctttctacaaagggtccaagggaggccacagaatttctgaatcttctgcagcccttactaatggagtcactgcttattgattgcttcagcataaatttgggagatttcactgtcccaagtccaattctggaagctattcaaaataatccacttgagctaaataagtacagggaaccaattatggatttcataacccattcttctgccataggactgttggttgatcccaaaagtgattccaacatgaacaaagtagtggagcagcttggtttcctggggcctcaactacaacacaacggaagactatacagtagcaggttagtggaggattgcctgtctaagtctctgcacagatgttgcgggagtaccaattgttgcaaccctctagaggaatatggtactgtaaggagctcaatttaccatggactaaacccatatgaggctctacttcattctatatgtgaaagggagaagataatgcgtgcatctaaagggctagtggagcctggcagtcttttcaagaacatgatgtcaagactccgagatgtcacagcatgctatgatggatccataagaacttcgtctggtaacttagttcttcagtttggctcaagggatgcatcaaattgtgtgacaccaggtgaccccgttggtatcttggcagccactgcagttgcaaatgctgcttacaaggcagtgttggctcctaatcagaataatataatttcttgggactcgatgaaggtgagaagctgaccagatcaattcactccaagcctcagttcaattcatatgtagactgtaatttactaattttgactactaaattttgttttactactaaattcatatgttttttttactactaaatgttactgttataggaagtactgcttactagggcaagcactaaagctgatgccaatcaccgaaaggtcattttgtatctgaaccagtgctcttgtgaaaatgaatgcatggagagagcactcacaattcgagcctgcttaaggaggatcaaattagaggattgtaccacagagatatccatcaagtatgtactatcaggctttccaattatttatgcttctgcaatgtaaagatacaagtcctattgattctactttacctggactataaattaaactaaatctacaaaacttatttcatgtgatgcaagcaattaaacagcaactattgatttggcatcctattgaactttttggggaaaaagagcatttcgttgaacttgcccagttcagtccagcattagtttcttagatttcccttttagtagttctacattgtccaaggctcagaattgttgggataatatttcaggtatcaacagcaagcaactcaagcagctcatcatcttgttggccatattcaccttgacaaggtctatcattcagtaactcaaattatatccatgtcatttcataataatcactaagattataagtttctcttgctcttacagaagcaattgaatcagattgaaacaattatggacagtgttcttcacaaatgccaggagacttttaggaataacataaagaagaagggatcgatgcgtgaaatattgaagacagtcactttcatttcaaggtgcttcaaacttctattattttagcaataaagacagtatgaatagagatttactgctcttctgaacttcaggtccagtagtctactaatttaagtcatatgttcagtgctagaccactaagttctttatggcacagttcagactctagtaaatatattatcttccattaggtatttatgcatttgggactaccatccatattttgagtaaaagaatatttttaaggaagtatgactatatttttgttgtaaactaaatcatgtgtttcttctttgcagcacaagtttgtgcgaccaacatacagatgatgataaaaaatttcaggtttcctgcttgcagtttttcctccctggaagcatcactaaaaatatatctgaatctactgaacgagttatcgatttcatgactaatgccattttccctataattttagacactgttataaaaggtaaaaaaaatgcaagaggaacatccagacagttatggtgaaaatgtcctatgcaattatgcttacttacaatcaattctgcaccttctcttcacaggtgatcctcgagttgaggaagccaacctagtaaggattgaaccagaatcaacattttgggtccagagctctggtgcagaacagaaaggcgaggcggcactggaaatcactgtggaagaggctgcggctgctgagagtggcaatgcctggggagtagcaatgaatgcatgtatccctgtgatggatctgattgacaccaccaggtctatgccgtacgatatacagcaagtccgacaggtgtttggcatttcctccgcattcgaaaaagtcacacaggttcagttattcccctttctccttttagctgaaattcaggtaacttctgctgaaacattgctcgtgttgtgctcctttcagtacctttccaagtctgttggaatgattacaaaatcagttctccaagagcacctgacaacagttgcaagtagcatgacctgcacaggcgatttgcatggcttcaacaactctggctacaaggccacatgtcaatctctgaaggttcaggcaccatttatggaggctacactatcagtaagtcatgcactctcatctcttttgaaatcctcacttaaatgagccagaaccaagtcttggtcataattcaaatataacaaaacatgttgcagagatcaatacaatgctttgagaaggcagcagcgaaggcctactccgatcagctgggcaatgttgtatcagcctgctcttggggcaataatgcagaaattggaactggttcagcttttgaaatcctttggaatgacgagaacatggtacatttgacaactttacttgttaacaccactcatatttacagagacttttgaagatcactttaacttcttatctcttttcagtcatcaagcaagagtatccttggtgggtatggtctgtatgacttcttggaagcagtagaaacaacaggagcaactaaagataaggcaattgttcctcataactactgcttatatgatgttgactgcattccagaggataaagtatgtttagaagaaaacaatcagatcacctggacagacaaaccaaaagctgaattcctgatggaatctgagggtaggagggcagggatgcacagcactggccaaaaacatccgaggaagccaaattggcatgaaggaaacaccaagagttccccaaattctactgcagtagaatttactggtcaggtgttccagagaaggcaactgaagaccaagagtaactggaactcagatgcaacacagcaagatgataaaccaagttggtatagttcaaatagcgcgggcacacagaacttcaccattgcaggatcatcccgaccaggtgaatggaacaggaagaataataatcgcggtcaaggtggtggtagagaagtgtggaaatcagagggaccacaccgtggaggcagtagcagtaataggaatcaaggtggtggtagagcagtgtggaaatcagaggcatcacaccgaggcagtggcaataataggaatcgaggtggtggtagagcagtgtggaaatcagaggcatcacgccgtggaggcagtatgaggcaggtagcgagttgtgcttttacaccagtggagcagcagatatttgaacaaatcgaaccaatcacaaagaatgtaaagaggatcatccgtgaatcgaggtatttttctggtccaataaacttgaaaaggcacaagtactaggattcttcatttttcgaccactagtacgttgatagctagatgataagatggaagttaagtgtatgttcaaacaccgcccaggtggttccttctgttgtatcccttacagtccatctctctcaatacttttgcagggacggtattaaacttcctccagatgatgagaagtttattgtcacaaatgttctcatgtaccacccagagaggaagaagaagatagctggcaacggcaactacataacagtaagcaacttgccttcttgaatctttctgcgtcagatgaaccaaaaaatggaaaaccatgaggactcatttgctgcttataggtcgataggcatcaggtattccatggaagtaggtgcttatatgtcatgtcctcagatggatccagaaaagatttctcctacaagaagtgcctggagaactacatcagagctcagtacccagatgctgcagattcattctgcagaaagtacttcaaatga

SEQ ID NO: 900 - DNA, 16253 bp, Oryza sativa
  source 1..16253: mol_type = genomic DNA
cagaagacgtagttgatgcaaagtagtcgtgccggaggatgctcccccaaaacttgatcacctgcctactcgtgcagatacacaagtggatggagtttcggaggcctgctcgtcccgagcacccgtgcaggcaggtgatgcctcacctgtgcccggctcggcgtgacgcgtgcgcatatggcaatcccaccatcacctcaaccggtcaacatgtgctctctaatagctctctatttaagttgagatatctccacttaaattttcaaggtggtattaattctataacattatttgtgagccaatggaatttattgggaataaattgggcctagcccatttactccaacatcatgtgattaaatcaaaccttacattgaaatatcgagcagagcacactacgagagccgaatcgtgcatgtcagcgagaaaatcgtcttttagataggtgtcaaacacaagtgaatacagacaattttcatcgggctacgtgagaaagaggaagacgtgggtaaggccgagactgtgcacgtgtgtgagtcccactgggtcccacaaaacgatttatacgctgcagagatcaaacataagttttgttcgtttgcatggactgaactaatcaatgcaacactagagatgccctaatcttggacaaagaggtggttggcttatcgtctttttgagttacgacgaagaggtgatgacacaactcatcctcatggtcaatgataatcatcgtcaagccctcatggtgtgtattgttgataagtgagagatcacgagaaagcatagcctagtgcacaataaagcttgttcgggcaagctcgtctcaacattttttagcgtccaaatttatcttggtaatgctagttgagtattgatgcagatacattggttgacttctatttcatcgaattggctcagtttttgagtcccttctatttactatggtcacatgcttctcatgactactcaacatcatcctgcttggtctagccatcaacgacatcgtatttctatcagccacgttggtgagttcgttcgttcattctagctctctgtattttttccatgcaaaaatgatatactgcttgctactccttttgcgtgtcaccttttcttttggcattgtgtaaaggcctgtgttcatttttggcgcttgataatttgcccatttatgacattggttactgccaaaaaccacccaaatcaaagaatggccaaaaatcagctggcttcacccaacagttggtgctacacgtcatcccattcaatgccttccggtcaatccccccatctctctcctcccagctcccaacacgtgacccccggtgacccccacactcactgcgaggtgggtcccacctacgccacgaccagcctatggcccacatgtcagtgacgtggcgtcgaacagccgccggcgcgcgggggtgacctagcctgacctgcacactgaactgcacctgagacctgacctcccaccaccaccatcgtcgcctcgctctcgcactcgcactcgcgctcgtgtgggttcccttctcggcttctccgaggcgagggcttggctgcaggctaaaaccctctccgcccccaccccccgcgcggtggctagggttttagggcgagggtgggaggaggcaggcaggcgcgcgcgcgcgcgcgggtgttcaggtgagggggaggagggctctgatcccgtctccgcaatgtggggggcgctgggttactcgcagaaatggggggaaaggggatgtggttggttgtttgtctgttcatcgtcgcttgttgtggggggtttgggtttccccgagggaagggaagatttgggtcgtgcggagaggcgtgggttattcaattttggtgcactttgatatgcctttttgtttcccaactaaggggttctatctcatgtatgataaatgttcaccggagtaatccgtgtgggtttggggggaagtttgtggtgtgctgggaatctaaacgaatcctgatgattgtgcgaaatgtttttttagttaggggaggggaggggatcctggtgagcatccgcatcctctttctgatgattcatctctcactctaccacctggagtgcttttgtgtggaatttgctcgcgttcgttcgttaaccctagcttctcttctagatctggaagaagctctttctcttaatttcagagccttaaccttgatacaagtaacagtttgtttgtacttttggatcttcccctgttgttgggtgtacttttggtgggtcgtagtaggatgctagagctaagatgaaacagaaggaaatgcagcttcagcggtaggagtaacctaatattagcttagccactttgccctaattaacttgcttggagacaagggcacactctctaagggaatatatttgttagtgcacccattaggaaaaggaaacaaatgattaaaatcaaaagcaagtttgatttggagtggtattttccgagaagccaacaaataattacagcggtttttatcctacgtttgcgaatttgaggttgctgttttctgtttgtttctgctatttcttgttgtttaattggagctaatggtgggttctagcttgttggtattaccggttctttcttttcaattctttttacggacacagccatgtccctttgtctatttcagatagatggaggaggaccagtcagcaattccggttgctgaaggtgccatcaagagcatcaagcttagcctatccactgaggatgagattgtaagttctccttctctgatgctttttaccagcaatgcttgcagaaagagatgcatgcagaagcgacaacttggtcattgtgatccattagagacagtaccgtctgataagggagcatatgattgatgtaactactcttgatgatgagatctagaaaccctccttttctctatcatttatatttgatatcatttgcgaatggacctctagctgagttggttaggtggctctagtagcactcctcaggtcctgggttcgactccttgtgggagcgaatttcaggctggggttgaaaaaaaatcccctcgtttgtcccacgccaaagcataggtctaaggaccagcctattttcacgggttacggtgctgctgtgtaagggtggggcaagggttcgggggttttcttgacctgcctgtgccgctgtgtaaggggggttagggggttttcttgacatgcgtgagaaggtcttaccctccctcccccgtcaggtcaagttttatatttgatatcattcaattagatttacctatgatgcatgatctgtgctattcaatcgcaatgcaaaatttgaatttgtaagattaattttatcaagatgagtgttgctatgagagcttttctttttgacctttacttttgcaatgtaaagatgaatgttgtttgttagttaatactgaaatctgacattttcttttgcatctggaagtgctgatacatgggctttttcgctaactaacggagctgttttacattttgtggatttaaatacttgatgttgcattcttctacttgattcatatgaatttagccttctttttttttgtattttttgtttctcatgaatatggcaaggatatatcctgcacagttcccatttatatttcctactgtaatactatgttttttatttccaacatgactgatacacacctttctgtcctgcagcgtacttattctataaatgactgtcctgtcactcatcctagtcagctcggaaatcccttccttgggttacctttggagacaggaaaatgcgagtcctgtggtgcctcagaaaatggaaaatgcgaaggttctcacatgatgacttctcattagtttttcatgcccaagatattgttctgtagcaactgacaatccacttttctcttctttaaaaccaaaattatctgcttatttagggcatttcgggtacattgagctgcctgtgcctatatatcacccttgccatgtaacggaactgaggcagatattaaatgtggtatgtttgaaatgcctccgcgtcaagaaaggaaaggtacatacaggtcaaagcagctaagtcttaattttctaaatccaattgtcttactttggcttataattaatgtgatcttaccatgtatcaggtcaaacagacagagggaaaggataacacatcagcattgtcatgctactattgtcgggtactttccaaccccaacaattttgtatatcccttctgccttgaagtagacagacataatatttcattgtttgacatgtataagtagtaggaatatggaacatatgcctctcgaagaaccaagtataccagtgttttaagtttaatccactcatacatagtccggatgttacagcttagttggttttaaattgatcaaaatctgcttgggcaaaacatagccaatgttactgacatagctgttgcagtattcactcagtaatcctatccatacatatgctttcacttatatattaagttacggaataagttttatgttgcattcttttgcaataaaaccattgattgcaaagtttttttgtctacacagagaatgagtgacagactagcactgtattcagttttatgtttgttcagtaacatgtcgtcgttgaaaacagtacacaggatcaaagttatgctgtatgatggagtgttattggaacttgtaagatgtggccaacaatcatgacataagcattactatatcatgtttttattagttttttagcgtatggcttttggtatacagctttagttgtttttattagatgctagccttgacactataaacatttacaatccggatgagtggcaactgatgttcatcgccatttacttctttaggatcttccggcattatctttgaaagaaatcaaaacagcagatggtgcatttcgtttagagttgaaaatgcctcctaggaaattcatgacagaaggctcatggaacttccttgacaagtatggatttcaccatggtggaacctcccactgcaggaccttgctcccggaagaggttaatctcatttactttatttttatgacttctgtaagctcctaaatatccaacaacctacatgatcgtctgtcattcctgtatcgtttgctaggctctcaatatattgaagaaaattcctgaagaaacgaagaggaaactagctgctcgtggttacattgctcaatctggatatgtgatgaaatacctccccgtgccaccaaattgtttatacattccagaatttacagatgggcagagcatcatgtcctatgtgagttcttcctcacgtttgttcttcataattttcctgactggttcaattctatgtcatggcttattatacttgcttctcatatcaggacatatcaatatctctgctgaagaaggtgcttcagaaaatagagcagataaaaaagtcaagagctggatccccaaactttgaatcacatgaagttgaatcatgtgatctacagctctctattgcccagtacatacatctaaggggcactacaagggtatgttgcatgatcttaatgtgatagtttatttaccatatttacatgagagcatgttcaggagagtcctgtctcagctagagaattgctccagagagtagctcatctgctcacacacaaattggtcacttgttttgtaatcgtaattgtcaccaagccatgaattaggatcgactagttgtcaactgcatttgcacaggctgtcgacttaagctcatttttacaacaatttcaatactccttatagtaaccaaactaaaaatatgaatttacatttgacttcatattaatataattataatgactgagcacatgcatacaagggattttgattcataaatctctcagaagatagcaacaaatgaccaagcatatccatatgggttgggttgatcttgtgtcgggttgatcctgtgcatgagtatacactgtggatggttatcattgaggatgaacggtctgctattgtgcgtctatgtgcaccctttattagagaaaacagccatgcaaaccatgcatgcattgtcagtgaattcataatttcatattgcataggacgtccgtcatgatcatagacacactaagcaaaactgctcatttccctacattaactatattatcgaactcccttatagctattaaacccgaaactacaacatttctatagtagttggacctgaaaaggttcatgaaattcatcaactattagttcatgttaaagctttcttccataggtttatgttttacaaccgttctctcccagtagttgtgtgcaatcacttatttagtcttgtttcttttgtcccacggtaatgttgtcttgcagggtcctcaagacaacaccaagagatttgcaatcagtactgatccttctgcgttatcaacaaaacaatggctggagaagatgagaacattatttatcagcaaagggtcagggttttcatcacgcagtgtacttactggagatccatatattggagtagatgtgattggactgccttctgaagtggcaaaaagaatcactttcgaagagcaggtaacagacatcaaccttaacaggttgcaagagattgtggataagggattgtgtttgacctacagagatggccaggcaacctatgccatcaccgttggatccaaaggtcacactaccctgaaagtcggacagactatcagtaggagaattgttgatggggatgttgttttccttaaccgtccacccagtacccacaagcattccctccaggcatttcgcgtgtatgtccatgaagaccatacggtcaagatcaatccgctcatatgcgcaccttttgcagcggactttgacggtgattgtgtgcacatctattatccacagtcccttgctgcaaaagctgaagcactggagcttttcagtgtggagaagcagcttaccagttcgcacagtggcaaggtcaatctccagctagttagtgacagtttgcttgctctgaagcatatgtcttccagaacaatgttgagcaaagaagcagctaaccagctggcaatgcttgttacatgttctcttccagatcctgctgtgatcaagtcaaagccgtactggacaatctcgcaaatagtgcaaggtgctctgccaaaagccttaacttctcaaggggacaaacacgtagtcagggacagcactattataaaactggatcttgacaaagaatctgttcagacatcattctcagatttagtgtattccactctttctgttaagggtccaggagaagcactacaatttttgaatgtgctgcagccattattgatggaattgattcttttggatggctttagtgtaagcctccaggacttcaatgttcccaaggttctattggaagaagcacagaagaacattgaaaaacagtctcttatccttgaacaatcaagatttgcagaaaatcaggttgttgaaatgcgtgttgataataatttgaaggacatcaaacagcaaatttcagattttgttgtgaaacgctctcatcttggacttctgattgatccaaagagtgactcttcagtgtctaaagttgtccagcagcttggttttgtgggtttacaactttaccgtgaggggaagttctactcacgtcgtctggtggaggattgctactacacttttgtgaacaagcacccagctgtcagagaagaacattctccagaggcatatggtcttgtacggagttcatattttcatggccttaatccgtatgaggagctggtgcatgctatttcgacaagagaagctattgttcgctcctctagggggttgacggagcctggaacactatttaagaatctaatggcgttactgcgggatgtcgtcatatgctatgatgggacagtaagaaatgtctgcagcaagtctatcatacaacttaactacacggaggatgatgccttggacttccctagtgcaataggtcctggcgaaccagttggtgtcttggctgcgactgctatctccaaccctgcatacaaggctgtcttggatgcatctcagagtaacaatacttcatgggagcggatgaaggtaataacattaaattattttatgcattggtaaaaggtaatattgtatgcatgcatgataagtttggtatattcctttaacctaacaggaaatacttcagacaacaagtcgctacaaaaacgatatgaaagaccgaaaagttatcctatttctgaatgattgctcttgtgccaagaagttttgcaaggaaaaggctgctattgcagttcagggctgcctaaggagaattacgttagaagattgtgctactgacatctgcattgagtaagtatccataattaatgctgtcaattatattggtatataaattaatgctgtcaattactggggtatgtagttatattcgcttgctttgcttttagtgaaatcaatgaaggactttatttcttttgtggttgttttattgtagttccctggatttcttataccaaagtctaaaactcaagtttccttttcctttttggtccttcagaatactttccatttttgaaatgtgaaagttttgcggatatagaatgtagatagttggcaaatgttcaatatctgtccaatgaactgaaaattatgtggatctagaaagtaacttagtgttaacttatctgtttgcacaaacagtgtgtttgactgggttaggtcttatcatatttagggatggaaactgggctgcacccgctgggtttcagcaccccgtaccacccccgcaatgcaagatattgcccgtccccatccccatccccgcacacgggtcagtcaagtttccccctgtccccatccctgcaccaggtatgggtcacccggtgggtccccacactcggtaacaggaacaagagagtagcaagctacaagccagcaacatgacagcacaacagcaacaaagccaggaacgaaccaacaaaactagttagccaaacacaaatgcctgaacaaccaaacatcaaacagatcatatccaactatccatacttaaacaccaacagcgtcaaagtatgaggtcatagattggcagtggcagcggcgcgttagtcgcgacagtgacgtggtgtgtccttgaagcttcacagtggcgcagcctagaggttgcccttctggttgcccaggtggcttcgtgcagtcgctctcgctccttctggttgccctgccgattggatctgagagagtggaggggaggagtggaaggaagagtggatgtggactgtgctaaggtttcagtactttatatatgcacctctgatttgggccttctaaatgcttttttttttttactttttgggctgtggtcttaaagggatttgcaccttcctgattgacttggggccccatggggattcgggggccgggggcctgcagaacgtccccgctcccagcccacccgatgggtgaacaatttggcctaaaacagccccatggagggtgatttcctcccatttacagcccataatagagttattccccgccggttatcatgtccgggtccccattgccatccctaatagattcatattttatctgtttaatgctgagaacccggtatctcttttccatggatctgcacatcagtgttcattgtccactaactagtcatggacttggttcattgatgttaaacttcaatcatttatatactcttgaaattgtccatcattatgcaactggaactgccataaaacaacttagaaattggtcacgacagtacccagataaatgcaagttttgatcattctcaaaaatggaaattgagataaaagtctccttgtcgcatattgttggcttttagtattcattatcatttgagcagaacaccttaaatataacattcacgttgtcaggtaccagaagcaaataggtttagatggaacttcagaagcagccccagcacttgttggccatattcatcttgacagggtattatgatatattcttatgttggtgaatacttgcatgcaaacagttgtttttattatgccctgataatatatgtacatctttctttcaggcacatttagaaaggatcaacattagcactgaagatattcttcagaaatgccaagaagtttctgggaaatatgggaagaagaaaggacatctcagtaacctgtttaaaaatattacattctctacttggtaactatctattctctactatattgcttgagatctcacgtttgaagaataaattgcacgcactgctgttttgtttatgtggttgtgtcctgccattagttgctatggttgttggcggttttatagttttggtagaagagggttgtcatcttgtagattgctagggttattcaagtgctgcattgctctttaatcagatgttcaatatctaatatttcaacatcatgatgatgtgaaatcctacttatgatatgtgattgtcgctcgctgtatcaaatgataagttagttaacctcaactacaaccatatgctgtacctggcttgcaagtttcatctccattgaagtagtagaaatgagccataagaaagaggtaaggggatctttatttgcttcctagttccaagattgttcagttttgattttctttttcatgttgtttatagcaaagtattggtagcttggcatagcaatggagccatcgtctaggcagagaatattgatgcattgtttatttcaaatcacaattcctggcaatattctacttaagttcattttcagttaatcatttttagcattaattattatctgtttactgtgagacgatattatattatttaatcgtactcaagttttcacccttactcttggcagcgattgtttattcacacagaagctggttgatggaaagctacctaagcttccgtgtttgcaattctttgtttctgataacatgatagtatctgaatcagtggagagagcagtcagtgtgttagctgattctctatgtggagtgcttttgaatacaatcataaaaggtactgtaagttgtacataatatgcttctgttggaatttcattttcaatacaatttattatttaggttcagttgaaaatcctttattcacatcttgccatgttttttaaggggtggggggggggggtccaaaaagccaaagaattatgattgatccatttttagcccttaaaaaacaattatcttccttcacgctcatgtctttcataatacttttctttttttcccccaaaaaagttaccactattttcagaaccataactgttattgtgttgcaaacctagttcatgatggggtaaaccattcattggaggggttcaaacaatgatggcttgtggttgaatggcactaggtggagtgcactgactgagggatggatttagagtagctggttaagggaaagatcatctgattgtatagagagatgtggctctgtttgaggcaataggatgtcatggcctggcataactaaaggataacctgctaacaaaggatgggactataatgaacaaattggtaccctttagtgctaaagctgctgcctgctggctccacagctgtaacagattaagacattctctgttaatgtttggtagttaactgattctattggttaaattattgttataaaattaatgttctcctgtcctgtcacaaaaaaaaaagtgttgatgtgttaaccaaataagggtagtacttttagctcaacaatttccttgaattgagaatgttgctctgcaggtgatcctcgaattcaagaggctaaaattgtttgggttggatcggatgcaacatcttgggttaaaaacacacagaaggcatcaaagggtgagccagcagtagaaattattgttgaagaagaggaagctttacatattggtgatgcctggagaacaacaatggatgcctgcataccggttctgaacctcattgatatacggagatcaatcccttatggtattcaacaagtgcgagaacttcttggcatctcatgtgcttttgatcaagttgtgcaggtttgtcaccttaccctttttgtttgtaagtttgggaggtatttcatttcaaatctgctgtttgcaggtcacgctgcagatctttccaatctttttaatggattatttgaccacttgcatttacaagaacttactaaggaaaatttataaatatatgaacttagtatttcatgatagctctatggctacctctgcttcacaaactactgtgtttccgtggaaatagctgtttgacaatgttgatctaggtgtgttggggaactatctatggtttacgcgtgaatgcgataattgcatttttttttccatgtctgaccaagattttaatgttaatagagaatgttgactggtggaacattcggttttgtttttaatgggcaagtttggtccatttcaattgagttgtatttgatttctacgatgaactcttttgtacatcatgtttgtgcttatggatttgtccaatgcattttataaatttttatcttgcatctcatttcaatagattattttatatgtgctgaattgtgcagcggctttcaacaactgtaaggatggtcgctaaagatgttctcaaagatcatctggtacttgtggcaaatagcatgacatttactggaaacctgaatggatttaacaatgctggttacaaggccaccttccgttccttaaaagttcaagtacctttcacagagtccacattgattgtaagcttatctctgagatcaattggtttgttttttatcatcacatacattttattgatttggcccttttattttgtagacccctatgaaatgctttgagaaggctgcagagaaatgtcattcggattcattgggatgtgttgtttcatcatgttcttggggcaagcatgctgcaagtggtactggatcatcttttcagattctgtggaatgaaagtcaggtaagctggttttttctgcccactggagcttattgattatataagaagtggggcttcactctatttaattggggctaatctgcttaaagatctttgcacggtgtgaccaatcaaatgaattagcgttttagtgaaaaagtagctctgcttattgttgtaattgatttttttcagctgaaaagcaataaggagtatggtgatggcctgtatgattacttggcattggtgcgtactgacgaggaaaaggcaagatacacattctttgatgatgtggactaccttgcagaagagaacgaggcagatgtgtgcttatctcctgaattggatgggaccattggtcaaccgatcttcgatgataatttggaagagcaagatgttcagaataacagctcgtgggataatggcacaacaacaaatgcaagctgggaacagaatggtagtgctggaaatgattctgataaatggggaggttggaatgatgcagctgcaggagctgacacgggagtcacaaaaccagcaaaccaagggaattcgtgttgggatgtgcctgcgacagtggaaaagagttcctctgattggggaggctggggcactgaaaaggcgaaggagaaggagaaaatatctgaagagccagctcaacatgatgcttggtctgtccagggccctaaaagggcaacagatggaggagccagctggaagaagcagtctagcactcagaatgatgggaactcctggaaagagaacaagggaagaggatcaaatggaggttcctgggagaaagataatgcgcaaaagggatcatggggcaggggcaatgatgaagctgaaaataataatgatgtgcaaaacaaatcttgggagactgtggctgcagatgctcatgcttctacagagaagtcctggggcaatgttactgcatctccatcggataatgcatggagtgctgctccggtttcccaagggaatggaagttcagatacaaagcaatctgattcttgggatggctggaagtctgctggagttgacaaagcaattaacaaagacaaggaatccttgggcaatgtgcctgcatctccatcatttagtgcgtggaatgcttctccagtttcccaagggaatgaacgttcagatgcaaagcaatctgattcttgggatggctggaagtctgctggagttgacaaagcaattaacaaagacaaggaatccttgggcaatgtgcctgcatctccatcatttagtgcgtggaatgctgctccagtttcccaagggaatgaacgtttagatgcaaagcaatctgattcttgggatggctggaagtctgctggagttgatgattcagttaaagacaaggaatcctggggtaatgtgcctgcatccccatcagatagtgcgtggaatgctgctccagtttcccaagggaatgaaagttcagatgcaaagcaatctgattcttgggatggttggaagtctgctggagttgatgcttcaactaacaaagacaaggaatcctggggcaatgtgcctgcatctccatcagatagtgcatggaatgctgctccagtttcccaaggggatgatgtctggaattctgctgaagccaatgagtcacgtaataaggactggaaatcagatggatggggtgccagaggtggcaattggaggggccaaagaaacaatcctggtaggcccccaaggaaacctgatggcaggggtctgcctaggagacctgatgagagggggccaccaaggcgacactttgacctaacagctgaggaggaaaagattctaggagaaattgaacccactgtgctgagcatcagaaagattttccgtgaatcaatgtaagttacttcatgattatttgttaattttgtgtgattcatgatttacagttatatgcttttaagtttctgaatagaggaggcttggcttttatatgaaagtatgctaggtccgacatttaattgatttgtactgtcttaagctttttaactttattgttgacttaaaattttgcagtgatagcataaaactttctccggaagacgaaaaattcatcaaagagaatgttcttgaacaccaccctgagaaacaatcaaaggtgtctggtgaaatcgatcacataatggtatggttctcttgttacttttgggttgacctgttgtgcaattgcccgatacgctataatgaaatatagcattcgtttggcttatggtgtgcaatggcctcatttaatttgacaggttgacaagcaccaagtgttccaggatagtcggtgcttgtttgtggtgtcttcagatggaactcggtcagatttctcctatttaaaatgcatggagaattttgtgaggaagacctaccctgagcatggggactcattctgcaagaagtatttcaagaggcgccgtgaccaaccaccagcagctgatggaggcacagcaccaggcactccagctggggctacacagtctactgcagttgatacccaggagggcacttcacagcagacccaaccagatatcgcaaccgctccagctgcaactcaacaagagactcttcaagacactccagctcctccagcagacgatggattgctcgggaagggacctagcccgtctgactgatgctcagggtgcgcttagagctgccaacatcctgcttgtgctctaatcctgccactctttttttcctacttggcctgacattgcctagtgactagacagatggtgactttgtgtagtagagaagggttagcagtctttaggtctcactcttccagacgaactctgtaaattctggatgttagtgagctgcatcccgtagcttaaactcgtttttaccctctcttttttttttatcttttttgtctttccagtatggttatttggttagtccaatgcaagccgattctgcgaggccgtgccgaatctgatgattttgttgttctgcaaggcacagagctctcgctggtgctgtttcattttggatgctgttacagggttttgtaaagacactgaaactaccatgcgaatcagcaaaagatggattccctgctgtgaacaagcaggtggccttgcatgaattcattcatcaaacatgaggtcttgctggtgacgccacaaatttggtttgatgtgtttgcactgagctggaccaatctgttcttgaaatttcttcaggttggtacagaaaataggtaatattgtattctgtcatttcattaccaagaccagtggtgtgaacaagctggaggcattgcttaaatgcatccgtcaaccgtatgattgtttcagca

SEQ ID NO: 901 - DNA, 10861 bp, Oryza sativa
  source 1..10861: mol_type = genomic DNA
tttctagagacattaaattgcaccacaaacatatgaagccagtccaaaaaagaagaatagaatagtttccttccttttgtcaagctttgaactcaagatcacttgaacatatcatttttatcttcaatgcactaaccaactcaactccatgtcattacttgcatgttggtgcaattagttacttatatttagtcctttagtacacattatcattctaaaaagtgtctctatatagtttaaaatgtctcaagaaaatgcctttacatatcaggcacattttacagtgccgaaagaatgtctctacaagatagaatctaataaactaagctgaaaatgtctctagagtaaaagttttctaagcaattcttaaagtgcctttataaagtgtctctacactgtaaaacttttgatcttagaagcaatttgcaaaacgtctctacaaaagtgcctctatatgaggtttttgttgtagtgaaaacatcatttcacaagagttataaacgtctgaccatcaccattggatatagactggacaatagaggagaccctagtcaccggtcagggtcactcccacggaccaactggtccttggatcgaagcttttcgcggactctgttgtccaacaccttacatggtctatcaaaagttttgttttttatggcatgtggttttccctcaaggctacattaactgcatcgtacttggagtatagcatctacgcttagcttaagtcaatctcccctatctctttctacgctctctctctcctataactcaaaacaaattctacgcgtcagctctaaagatcacttcatttattgcttttgtacatacgcattttataaaatatccttccgcatggttgtcgggtcaaaagacatccttcaacatagccttcaggaccacaaccctcacgcactatattaccaaatgcgtataatagaaatggtaacacgaagctacagaactgtcttgggtggctctatgcacaaccatttcccccattccgtttccaacctctattaccatacctacccaaaccattttccacacaagagatgtatgtgtacccatcatgccatcaccgtcggatgcagatcggacggcggaggaccctcccaaaaaagtgacagcacagtcaaaaacggcaaaaagtaaagagtagaaaccgaagagggcaagccaggtcaaaacccccctcaaatcggaaacctacaaagcctacacctacacagcctagccttcttgtcctccactaccactgtgcagcttccttcctccgccataaagcagaggagagagagcctcacgtgagaggcctcctcggtctcgccgcgctccccccaaaaccccccattttgccatcatcgcctcgtcgccgccgccatccgccgccgtcgtcgccgtcgtcgccggcgacgagtaggtgggactccctttcgtccatgttccaaagatgtttgtgtttgtgtgggcgggttttgtggtgggttgggtgcaatgtgggatgagaagggtgcgtgtctcccttcccctgtttcttgatcgctccgccgccgggtttgttcgccgttgggcgagtggtcagaggatgaggaggagaaaagaaaaggaaataccaaaaaggaaaaaaccctcttttttttttgtttgtgacgcacaaatctgttgcggcgagtgggttttgtttggttttggcacgagcttgcttgctctgtttttcttttattatttccgttttgttgtttatcagattgcgattgttgatgctgggttgcgtgtgtgatgatgatgatggaagtggggggtgattgggcggtttttgatggtggttttcaaccaaaaaaaggaaagaaaaggagagattttttgttgctgtgattttggttttgggaatggtgcgttttgatcatggattgctgactttgtttagaccaaaataagaccatcttttggagatgattgcgatgttgttgtgggtgatgtgaggggtgggtcgggaggggatcatcgtgggatcttcattttgtgacgagcaacaggttcgctcgatgttgtcggggtttgttcagagaggagcagagatagtggtctaataggttaagaaaggttgatttctttttgtgccattgctgggataggaatgtttaggtaaaatggttctctcttgactgttgtgcagaaaggccccgggtcttctgtctagcaccacaagatgtatgttagcggttagccgacccgggttcgagtctcaccctccctttaataaatttcaatatgagagcccctcctctcatactatgcgagttatgatcctgtaatcatgttactgtcataatgtgcgtgttatgatcctgtaatcatgttattgtgcgtgcgccttttcgaggagtcgcttgcggcttctgattcaaggattacatgatgcttttctaaatatattcatttttttttgttcttagttgttaaaaggaacacacttctttttttttgttaacacagggagaagctgtctggtggttagcgatggaagatcctgaaattactggtcagcagtcaccaaatgccacaagtattgtgacggatctcatggatttggatgacattattgttgagggcaatgaggtacagtttgctatggatgtggatttgagagcaataccatctctgaaagatggagggcacacagacccactggtacaaatcccaggtgacatgtctcatatggatgtggatttgagagtgataccatctctgaaagatggagggcatgcagacccaccagtacaagtcccagttgacaagaggattgcaagcctagagaagctctgtaaagaagcatcaagatcatttttcagggaaactaggctagttagccatcagataaactcctacaatgattttgtctctcatgggctccaaaagatgtttgattctctcgatgaagttactgtcgagcctgactatgatccttcaaagaaagtaggcccctggaggcacgcgaccatcaagtttggtcgagtggagcttgaggagccggtgttttgggtcgacaactgtgatcttgatgtggaaacactcaaactgaagcctaaacatgctcgcctccagaagatgacatactcttcaaagatgaaagtagaaatgactgttcaggttgcacctttgacacccctcatactgtgttcagcacgaaataactgcactatgcacaagaaaaaaaaattaaatgcaagaccgaatcatgaacaattttcataactagcagcaaaattagtgagtttgagcaactcttgacttcatgtccacctgttaagtttgttgtcacatgaaagttggcactgtagccataggttttatgtttttcctacaccgtgagtgaaaaaagtttgtgtaactctccattacatattgtgatcacactgttacctagcaaattatcaacgaaattggtatgtttgatcctaaattgtactgtttattcctctcaagcagtagttatgagttaaattaactctcttgtatatatttattaatctatagtactgaattcttgtattgtcatttttctattaaatttcacaccatctgattaattaatatttttgctgtatcaggtctattcactccacaaaagcgacaaagctaaaactggcgaggacccatatatacaaagaaaagatataatgaaagagactaaatgggtcactattggcaagttacctgtcatggtgaagtcaaatttgtgctggctgcataaacttcaggaaagcgaatgcgagtatgattttggtggatattttcttatcaagggaatggaaaaggtattgcttcacatgatctaacaatgcccaacccacccagctagatccaacgatcggaaacaatttgataccgtgaggtaccggtacctcgaggtactttttgttggaccggagtaaatctcataatatatacatggcgtattttactgttgatcaatggataagattttttactggtcttaccttccaagggtctggtacatgctcttagtgcaattaatgcaccgagaaaatttttattaccattctttcattttccccatcctgatgcagcaaagtttccttttctaaacgctaagagccgatgtaagacgttgttaagcttaacatcgatgtttctctccccccccctcttccatgtcagcaaatttaccttgttaaccaccctaagagcctgctattaattattgttgtacatgcccagaggtaagtggagcaccctaatttccttttcatgaaaagtggagcacccaaaaagagcttgtacggcaggatacatttaaaacaacaggcagaacatattcacacataatagtctcacaagatagactagcttggtactgccaaatctgcaatacatatgagtctggaaagatctgaactcagatgaagttagttagatctagcttaacttgtaatgcatattataagaatttgaccatagtgcaattctggttttaaatattagatttgttttgcttcttagttgtgcattgcaacattttaatatgaacctattttagtaattcactttggaattatactttgtagtcttgtcaaaggaattttcagctgcagagttttgcactgcccatcaaaatttaccctcttctggatcactttaattcttaaagttattaccctatgtcggcgcatacaacgtttgatgccatctctgggttatttaaaactcacgtttttattacttccaaccatgtaggtattcgttgctgaagagcagagatgcctctccaggatttggatcaatgacagccccacctgggaggcttgttaccaacggtctcaaatccgacgagaaaagatctctataaaacctgttcagtctaatgatggtttcagaaaagtcattaacctgtactttttgggtgcaactataccaatctggataatgttttttgcactaggtgtatcatcagacaaagaagcttttgatattattgacatacaagaatgtgatgcttccatggccaacataatatcagctactataactgaatctcatgagcagtgcgaaggctttcagagagaagggagagccagtgaatatattgataagttgatcaggaatacaaagtttccaccaaaaggatcctttgatgagtatattggtaggcatatgtttcctgatgttagtgggaataggagcaaagcactcttcttgggatacatggtgagatgtcttctattggcttcctctggcaatcggaagagtgataatagggatgatttccgcaacaagaggctggatttggcatgtgaattgctccagagagagctatgggtacatattatgcatgcccagaaacgtatggtcaaggtcatgcagagacatttgagtggtgatggtgacctacaacctcttgagtgttatgtccatgcatcaattgttaccaatggtctcaaccgtgccttctccactggttcctggtgccatccatttaataaaagagagaggtgttcagggattgttgcaacccttaggagaacaaatcctcttcaaatgatgtctgacatgaggaagacacgacaatgggttgcatatgctggaaaggctggagatgctagatatccgtaagtacctttcgacatagaatcattcattcctgttataatttatttttttgttttcaatatcctaatgcaaactgacttaccaaatcctttcctaggaatccatcatattggggaaagctatgtttcttgtccactcctgatggtgaaaagtgtggatttgtgaaaaatcttgccattactgctatcgttagttgtttggcaagggagccctcggttgacgcacttgtttcttgtgggatgaagaaactggatgaactgcttctacaagagatcagcgggaaagacagaatcttcttgaatggaaacttggttggagtttgtgcagactcagtcgagtttgttttgcacttaaggagcatgagacgcaggaagcaaattgatgcacaggtttctttcttttccagattctgctacactggaacggatttttttttttactttgaagcattgtgtactaatccatgattatgctttgctttcatttatgatgattgaaaatttcctgctaagctattatgctcaattcaaccttgaagcatctctgtgagagattttacatatcatgattgtttgtgctctccataattctgatattgttctgctgttatgggtggctagggatcgtatgggatatgagtgatgggtgggtggccgtggcttaggtaatttggttgatcggcgccccaggatgggcacttcggagaagaaggtgagaaaacagagaaacagatgatgaggagtagattaatcttgcttacttaattcctgagtttaagtgcctcttataggcttacaaaccaaaactaacaattgcaaatagaaaggaactaatcctaacagactccctaacaaactcactaaatatctgattactgttcccgtccggcacgggagaggatcacggcgctgatccggctgttgcgcccttgccgctgtcgatcacatccgtggcgccatccggccttcgcctcctttgatagacaattccgaccatgacatctgcacacttaaacaaggtgcctttaaaagcagtccatgattggcataatctgtctcataatcatttcttggggtatggttttcgcattgtcaccactgatttatttttccagaaatcctaatggaccgcttttgtgtcattcttgtttgagtttatgactttatgcttttgccaaaaaaaaaagaataatcctacaatgtttggtaaaggaaaagggaattgtattcttgcttgttaatatgaactttccattccaataaaatactgttctcatacttcatttccactatgtaatcctttttaagttacttagtaaaattaactaatctgagccaagaagtatatttgatgaatgccatagttggcccatatcttgttgtaagcatgacagcatatttatcacgttagagtactatgtttccatttcttctgtgaaatatgcaacagtatgttaatacaactagatagtactgacaatgtattttggttttaactttgattaggtggagatcaaaagggacaagcaaaacaaagaagttcgtatattttccgatccaggaaggattctaagacctcttcttattgtcgaaaatctacgaaacatcatgaatcgaaagaatggatcatactccttccaggaacttatggatcaaaatataattgagctgattggtgttgaagaagaggaggatatccggtgtgcttatggaattaggcatctctttgcaggggacgaagaaaagaatttctcattctatactcattgtgaacttgacccttctttcttgctaggattgagttgcagtatcattccctttgccaaccatgatactgctaagagaattctaatgcaagctgaaaagatatcgcaacaggctattggctactccactacgaatcctctctttagagttgatacacattcccatcagctctattatccacagagacctctgttcaaaactgtagctgctgattgtcttggtaagagagactatacatctggaagcaaacatgactttgccagaccagagtatttcaatggccaaaatgcaatagtctcaatcagtgtccatcagggatttaaccaagaggattctttggtattgaatagggcctctttagagcgtggcatgtttcgaacacaacattttaagagctataaagcactgatagaaaacaaagagatcaccaaacgattaaaacacaaggaaaatatcaattttggaaaaactcctagcaagaaaggcctggttgacagtttagatattgatggcttaccatatattggagcaagtcttcagagtaatgacattatcattggaaaggtctcagactctggtgaagatcatagcatcaagctgctacatactgaaaaaggaatagtggagaaggttgttctttcagctactgatgatgggacaaattctgcgtttgttactctaagacaggtgaatatgcaatctttacaaaattaatctgcactaaccatttataaatttgcaagatagtggagttctctatgacacactattggaatagttgaatggccaactgattttttctacactaatcgacattctattagagttcattgtgtccataccataacacatcaatcattttcatcttctcatgtctactctgccataacacccaagtgatgaacattagtactgttattccccgtgttccaaaagatctacttgtaaatctgataactgatgaacacttgttaaagttagtaaattttttgatctgattacctctgcagactcgctcgccacgcattggagacaagtttgccagcatgcatggccagaaaggagtcattggcttcttggattcccaggagaacttcccttttactcaccaaggcatagttcctgacattgtgatcaatccccatggctttccaactcgtcagactcccggccaacttcttgaagctgcactaggcaaaggaatcgccctcggcggtgccacccggtatgcgacaccgttcacaagtccatctgtggaagtgatcacagagcagctgcacaagtaagcaattcattctgcccaaaatgatcagtaaatttgattggtttctcttcatgaaagtagaagaactagaaatgttccaaatgttgttgcattttaatccaggccaggttctcaaacaataaatttgattaatttctctccattaaaaagtagacagaactagaaatgtgcaaaattttgttgcattttgatcgggttctcaaacaaggaacttgattgatttctcttcatgaaagtagacggaactggaaatatgtgaaattttattgcattttgatcaaaatcgggttctcaaataatgaacttgagtgatttctcttcataaaagtagagagaactagaagtgttttaatttttgttctattttaatgaacttgaccccattttctttatgaaattagtcagaatgaactagcaaaatgaatgagattcaactgaaaacgtggggaaaagagttgtagtttttttgtcagggctgctcaaaatgatcaataaaattgactgatttctcttcatgaaagtagatagaacttgaaatgttccaaattttgttgcattttgatcagctctgggttctcaaattatgaactcggttgagttctcttaatgaaagtatgttccaattttcgttccattttgatgaacttaactgaattccctttaagaaactagctagagtgaagtaatcaaatgtaagaaatataactgaaaatgtggtgaaaaaacttggattttattttgtcagggctggatttccaaggtggagataaactagaaatgttaaattttgttccatcttgattactgctggattctcaaatgatgaacttgattgaattattgtttctaactgaaaatatgtgaaattgaactgaacttcatgaaactagtactagattgaactactgaattatgtcaaatataactgaagatatggggaaaacaatggatctttttgttggacagggctggattctcaataacttgattgatttctcttcatgaaaatagatagaactagaaacgttatgaattttattccatcttgatctgagccagattcccaaacaatcaactttcaccgaaatatcttcatgaaactacaatagtaatcagatgcacgaaacttaactgaaaatatggggaacaaaatttctctctctctctctctctctcttggacagggctggattctcaataacttgattgttttctcttcatgaaagtagatagaactagaaacattacaatttttatcccctcttactcttagccagattcccaaacaaacaactttcaccgaattctcttcatgaaactacaacagtaaccagatgcaactgaaaatgtgatgaaaaactttggaattcttgtttctttgaacagggctgggttctccaggtggggaggggagagcgtgatcaacggccgcaccggcgagcgtgcggcgtcgccggtgttcaccggaccgacgttctaccagcggctccaccacatggccgaggacaaggtcaagttccggaacaccggcccggtgcacccgctgacgcggcagccggtggaggaccgccgccggtacggcggcgtcaagttcggcgagatggagcgcgactgcctcctcgcccacggcgccgccgccaacctccacgagcgcctcttcctcctcagcgacgtgtcgcgcctccacgtctgccgccgatgccagcgcgccgccgtcgtcgtgtcgcccgccgtcgccgccgacggcggcggcggccggaaggtgagggggccgtactgcaggttctgcaggtcggcggaggaggtggtgagggtgagcgtgccttatggcgccaagatcctctaccaggagctcttctccatgggcatctgcctcaagttcgacaccgagctcatctagagtagactctcagctttggacgggaaacatcatgatttattcttttaaaaatgggatttttatcattttttaagaacatttttaaggacattttagtctggtgaggagagttgacaatttactccattcattttatattataagacgctttggatttgtcgtaataagtctcttgaatgtcattaaaacctgtattgggatattatccaattggggcaattgtgttcttacccctactttcatatctaattgtgattttacccctcttttcta

SEQ ID NO: 902 - DNA, 10569 bp, Oryza sativa
  source 1..10569: mol_type = genomic DNA
cttggagctggaggcaatcttgacgatccgaaggactgaattttgctgaaaatgttaaagttgcagctatttttatgctgtcatttatgatttctgcatctagaatctataagatttcagatcaccattgcactatgctgtcaagcatgactgcttgatcgaaactgaattctgaattatgtggcttaggccttgtataaagtattttgtcattcatatggcacttacatacacaaagagcagaatacctgaagagctgtttgattgaaattgtatccttctgtacagttgggatgttctctcgttacttctctttgttcttccggttcctgaaactttttgcctgatacagagttttctggtgccaaatgtatttgcaaagttgctatgctacctttggcacaatagtagagcttgtgggtggtcattgtcacattctgggtttacattttaacgaaaaccgatcaaaaccgcaaaaatttgaggtttcgtaggataaaagtagactccgaatgaaatttcaaatggctttcgtaattcaaaattgaaagagtgaaaatcgaccaaaaataattaaaattcgttgaaagaatgtcatactgctgcgatcaggatccgcggggatgacaatgggtcgggtcggacacgggtagagcaaaaccatgcctgtcccgatgcccgatgtgggttagtagacaaaactccgtgccattatgggcataggtatatcggcggtacccaatagatctcacatgaacaataactcaaaagttgtaatttaacgaagagaaataaaatcaataatttaccaaattattagttatcaacaataatttgaattactcagaacttattatcacttatcatcacaaattaaccaagagaaaggggtataagaattaagatattgatctaaattagctaatacatatgtatcgggtccggcacgggttacccatgggtaaaaaatataacccagttgttacccacgacgtctttggatcttggacggacgtgtccacaggtaagaaatcacaccgacactcgtgcccatcgaattgagtatccgatacccggacctgtgagtaaaattgccgttatccgccgcttaatcggaaaggtgacgtcactatgtttaagtgatgggaggggaatgagcttctacctggagtgggtcccacgctccaaccatcgcccccggttttcttcaccctccctgaccgagccctccctccaccctctccggccgctccctctcgccggcgacagatcgagcgtccacggcggcggcggcgcgacggcagaactcgggaacggcggctccgtcgccggcagcacctttgcgcactcgatcagacggccgatcgttgaaaaacaaatgataaactggtcggaccggtttggcccggttttcataaaaaaaccgcctggtcctctctctccagccaccactgaacatgctaccccacataaaacccctcacagaccatccccttctccgccagaacccttctcccccctcttcactctccccggaagcatcgctcgcacgcatcggacgccggaatccccgcctccggcgactagggtttcgccctccggcgacgcccctcctctccaccaggtacattccccctcccgtgtgacgggggctctggtgaggagccccgtccaacatccgcccccctcccctcaatcccctcctcctccccccatttatttctcgcgggttgagagctccgtgtgctccggcgaggtggctcttccacgagggtcgtttacaccctgtcgcgagtgggttttcgatgggatgggaggaggagtagggtaggggagcatgcacgttttcatctgggtggctgggtgggtggattgcctaggtcggctcggtcggcgcggagtaggggaggagcaggggagaagccggagcacgtctcgtagatcgagattccggggtaggaggttgaggctgcggcggggggtcggaggcagagatcttcgaacgattttgttcctgatggtcatctccctcgccgctttattaagactggcgtatgttggtatctttctggcaaacctaaccttgttgggttgctgaggccgctctactgcaatggcgtctatcagtaattaatccaaatctgtctttctgggatggaagggtgtgccaaatcgtccacttttttgtggatttattagtgatttgtttattcgaactcttgatgctgccagtacctttagttcctgtcatgtgatgattgagagctatggtgtaaattgtctgacatattttgtgccaggatgagtgatggcctttaattctgttatttagcggagtagtacatattgagataattcttttttcgcttatacagttctgttaaacaaattaagggtacagctactctgatttgttcctttgctagttttgtgtcacctagtgaatcttaggctgaatgcttcttttactgatgtgctgagtttgaaatacctatccttttaagaaaacactgtatgcgggcgagtgtatgtgcacacattgcgcgtgagtttacgtgtaccccatgcacgtaaattcaaggataaattccttttatatgactgaaagttaatccatttccttatttggcactcattctctcagtgccatgtgggtctagggcccacatgtcagtgagccatgagacatcaatggcaatcaatggactctgtagaattttcagtggaaaaaggggatggccacaaagttcaaggatttctatttctagtgcttcaggggtgaacatgccaatgttcatgggtgttcgggtaaatactcacatgtttaggaaacagcgtgcatcaatccacaaggctctgctctgttggttaccaggcgtacacatctgtactgcaggttctgggtttgattcttggtttccagtcattcctattctttttttttgggggtggggccgcgcgggggaggggggtgacatcttttttcttcttgtttttttgttaggatttcaatagtttatttcatcctcgtattagtgctattgtgctaagtctcaatatggtatctctactatgaaaaatatttaatttaatttttccattaatataatgatactagttatatgtttttattaaaccttgaatacccaacctgcacattctgcttctgccactgcttgaatgtttgctatctagttagatggtttttgtgattgtactgcactgtttgctaggctattccctcgaagttatggaagagccatcaaaggacaatgggcaatcatcctgtgttgttgatcctgagctggaacctatgatgctggatgatgctagagagggagtatcccatacattggatgatgcaaatgggcattcttctatggatgttgacagaggatgccattctatggacaccacgagatcatctctgggtgatgatggtaaaggaaagcgcgactcatatgcccaaattccagtcgacatgagtattccaagcctagaaaagttctgcaaagaagcatcaaggtccttctttgatgagattggtctgatcagccatcagataaattcttataacgagtttgtctcacatgggctccaggaactttttgattctctgggggaagtgactgtggagcctagttatgatccttcaaatagaggaccaggtggctggagacatgctatcatcaagtttggaagagtgcaactagaagaaccagtattttggtctcatggatgtgatattgatgaacaatcgctcaaactgaagccaaggcatgctcgcctacagaatatgacatattcttccaaaatgaaagtggaagttcatttccaggtcagggttcttattgttattttctacactaaatatttacttttatgccataatttgttgaatgccatgagcacaaacggtataagcaatgcaaaaaaaaggtagctgtaaatgcttatatgtgctcagcataattcctttttctactttttgagcgctgtgtacaacacacaatcaattcctgttctcctacgcttagcttgtaaaagtgtgaacatcacgtgacaatttgtccatccaccgaacatcacctgaagaatatagaataaaatagtccacttataagcgtataacatgaaatggagcagtcaaggatcagatgggtgattagtgtttcttgagctgctccacagtcagcagcatgcgctgttgaataatgtatggtactgtttcagtcatgcctgatcctattatcttaattgaactattatgccaatatatttgcctgttcctagtattattgtgcgctgatttgtctccctgatgcaaaacaaagctatgacgtgttggtgttccttagttttctttggtgttactataatctggtttactgaaatgttcttaaccgtgtcaggtttactctatggagaagagtgacaaggctaaaacagggaatgataaatttggttacaagcgaaacattattaatgaaacatattatataaatattggccgccttccagttatggttatgtcaaatttatgttggctccacaaactcaaggaaagtgattgccaatttgattctggtggatactttttgatcaagggaatggagaaggtaatactgtatattcatgtttctccttgccttatcattcagtgattatgtattgtgcctggtctccattctttcattatcatgtgttcaagcgtttatttttgtatgctaggatgaactgcaaggttgtggggggaaattatatagtagaaacctctgcctaaatggaaagttggaaactcctactcaaaaagtaaaaaaaaaagagagaggaaaaactcacatgtagatatggtaattgttatccatgcaaaatatcaacatcaaacccaacatagtttgtgagatatgaaactggcaaataatgaaggaaaagtacttgtcctgattttttttttctttttcttcgctattgtcaatttcatatctcatagatagtcaaaatttgatcttgagatttcgtatggttgcctaatatgacctttcctttatgtgagtttctctccctttttgaaatttttggataacctcgtggtttcctccaaagtttggaggaaaaccactactttataggaaaccaccaagtcatccaaagtagtggttttcactacagattttcctccaaattagttctgtagaatcatttcattttttttttgtttggcgttttagtatagtgtgtggacagctgaccatagccctaattattcgtagtgatctgttggagagtgattctcaatgtttaaaccctctgctggaaagaaagtttttgtaccatatatggcgtttttattttatatcactatgtttcatactatataaattttaaatgctgcaggtattcattgcgcaagagcaaaaatgtctgaccaggatttgggttgaggaccgtccttgctggatggtctctttcttgtctccaatcagaagaaggcgcatatatataaaactaattgattctgcaaataatgaagatgccagtggggggaagatcatttccatctcctttttgtatgcaaatatgccaatatggttgatgttttttgcactaggcatatcatcagataaggatatctttgatgttataaatatggaagactgtgatgcttgtgttatcaacacaattaccgcaactattaaagaatcagatgaattgtgtgaaggcttccgtaaatcagataaagcccggcagtatgttgacgaattgattaagaattcaaaatttcctcctgcagagccatttgatgattatattgctaaatacctcttccccagcataagtgggaaccggaacaaagcacttttcttaggttacatggtcaaatgccttttaatggctttcactgggaagcgcaaatgtgacaacaaggatgatttccggaacaagaggttggacctagctggtgaattgcttggaagagaactccgtgcgcatattaggcatgcagagagactcatggttaaggccttgcagagagatttaaatagtgagcgtgagttacaagaatttgatcattatctggatgcttcaattattaccaatggtctaaaccgtgccttctctactggttcttggtgccatccttacaaaagaaatgaaagatgcgcaggaattgttgcgacactaaggagaacaaatccgcttcagatgatctcggacttgaggaaaactcgccaacgagttgcttatgctgggaaagccggtgatgcaagatatccgtaagtatcttcttatgtttcatgcctatcttgtactatgatgtaaactgacttgaagaaaaaaatacttacagaaatccatcctactggggaaaattgtgttttatgtccactcctgatggtgaaaactgtggacttgtgaaaaatctagctgttacagctactgttagctccagagtagcaccgccattgattgacaggttcatttcttgtggaatgaataagctgcatgagattcctacagaggaggttcctagaatggataaaatcttcctgaatggggattgggtggggtcctgtagtgacccggcttcatttgtcttgcgtttaaggtgcatgagacgcagtggtctgatagatccacaggtttgctctcatttcccatggcaagaagttttctgttggaaccttttttgagcattatgtcaatgattggtgtgctagtcccatagtcttcatcatgcctagttaggaagagtccctaattttgtttcataacctttttggaaaggtcaaactcaaatctgaatgcttagtaagtcattgacctgtattatcttacttctattcagcttgaataatgttgctttgaacgttatatttaggtaatcctgatttggactctatttaagttatgtattctatctggatgcatacacactgggatattggttcctgcatattttttccccttctgtgtagtatgtgctaccccctccgttgaataaataaagtgtatattgtgtctccaacataacaacttgacaatagttttataacctgatgtaacaaaaggaaggaatatatggaaacatctatcaagacagataatgatatatttttatacagttttatgtgtttacttcctctgtcccaaaatatagcaacctaggactctgtctagatatgttgttctaggtggtgtcccatctagtcgttctatgttgctatattctgggacagagggagtaatatatattaatggcctctagatcccaagtaagttacattctggaacagagacataacgagggatactttacatgttgccactaatagtgtatctttttttaatgatccatttgattaggttgagataaaacgggacaagcaccaaagggaagttcgggtgttttctgatgcaggtcgaatcctcagaccgcttcttgtggttgaaaatctcaataaaattaggagaccgaagggcagttcatattcttttcagtggttaatgcaacaagaaataattgagtttattggcgttgaagaagaggaagatatacgaagtgcctggggcatcaggaacctatttgagagtgaagaagaggctcccatggtaaaaatgaataaagcagaggatgtcttcaatgttaagaggaagatcggaggggaggtttcaggttatacgcactgtgagctggatctttcttttctgctaggattaagttgtggtattatcccttttgcgaaccacaattttgctcggagggttctttaccaatctgaaaaacattcacagcaagctattggatactctacaacaaatccgcacatcagagttgataccctttcccatcaactttactatcctcagagaccccttttcaaaacagtgatagctgactgcattggtagatcagaatatacttttgggagaaaggatgactttgccagaccagagtatttcaatggccaaaatgcaatagtggcagtgaatgttcatcaggggtttaatcaagaagattccctggttatgaatagggcttctcttgagcggggtatgtttaggactgagcacttcaggaactataaggctgaagtagagaacaaaggtgggccaggtggcaacaaacgactaaaaatgaaggataagattgacttcggtaaaatgcaaagcaagagaggacgtgttgacaatcttgacgatgatggattaccatatgtcggtgcaagtcttcagagtggtgacattgtcattggaaaggtctcagaatctggtgaagatcatagtattaagctgaagcatactgaaaagggtatggtgcagagggtattactttcagctaatgatgaggggaagaactttgcagttgttactctaagacaggtaatgatattgtttttattaaacatgtatcttctatccagcatattcatgatcctgacattggttgccagttgccactatattcatattatagtactcaacaatagaatgctgtcccttttgaaaatgtgcaatcaaacttttggactttccgagtgatgacataaaagagagattgtgtatatggtaaaaccattactagatctatcatgtacaacactttcattcaattatgccactaacatttagtaaattctaatagctaccagcattttcatagaaattggtttcagagtgcaattgtgcaatgtccaaactggcatatttgtggggagatcaagttatcgaatattggagtatcataatcattgccatacaggatgcttgcatgacttacttgatctggcagtccagatcctgcttatttccttattatttaatttcactgctaaacatgatttagtaattgcattgtcaactaggtgtcacctagtcgttgttacatgactacatgagtcacccaagactagtgacttggcaatcttattctatcatatgttttttctaatattttaggctgtaatatgatatttacattcactgagttctggtggccaaattaagttttgttaatatgatatttacattcactgagttcaggttcgatcaccttgccttggagataaattttccagcatgcatggccagaaaggtgtcgttggttttctagaatctcaggagaatttcccatttacttaccaaggaatagtaccagatattgtgataaatccacatgcatttcctacccgtcaaactccaggccagcttcttgaagctgctttggggaaaggaattgccctcggtggtacaatgagatatgctacaccattcacaacagcatcgtttgatgtgatcacagaccaattacacaagtaagtgtttcttctctaatggatgaattggtttctttcctaaattcactaaccaacctcttcacgcacattggtacaatagatgaaatgatttcggaggggcattatcgctcaaatctgtttgtttaactatgtggttacacacaaactgatattgtttgagctttcttgtaaatcttgttcgttattactgcaaagtgcacattgagcaaaaaaagacaaaaaacagtgcagttttacaagtgcgcaattcagcatcacttattcttgatatgttgatcaatcaggtcaatgtgtgcatgtcaccttaagtggcataaacaattgtttcagaaaatgtcttgtagtgaaacattactacaaactgatgtctcgttccatttcagggctggattttcaagatggggagctgaaagtgttctcaatggccggactggtgaaaggatgcactcattgattttcatgggtcctactttttaccagaggctgatacacatggcagaagataaggtcaagttcaggaacacggggccagtgcaccccctaacacggcaacctgttgctgacaggaagaggtttgggggagtgaagtttggagaaatggagcgtgactgcctcctcgcccatggtgcagcagccaacctccatgagcggctcttcatgcttagtgacttctcgcagatgcacgtctgccagacgtgcgaacgtgtggcgaatgttatcatgaggcctgtcccaggaggaaagaagatccgggggccatactgtgggttctgccgctcttctgaaaacatagtaaggatcaatgtgccctacggcgcaaagctgctctatcaagagctattcagcatggggatctgccttagatttgagacggaagtctgctagaactccacatctactatcgactcaccatgtatatatatcctcgttgtcccttggagattctgttatgggcattagtgttgtagccacatgacttctcttccggttggacgatggcatagctaggaggggtgaatctgaagtcaggtgaaacctttcttttgctatttatttgggtgaagactcaattcccatcacctgcctttgatgtcctgtgaccaaccgatggcatagttagggatggggtgaatcagaggtcaactgaaaacccttttgctatagttcgatgtttcaccttggcactgtactatgcatatttggatgaaaactcatttcccatctcctgcttttgctgttctgtgatgaa

SEQ ID NO: 903 - DNA, 7231 bp, Oryza sativa
  source 1..7231: mol_type = genomic DNA
cttaaggaccgtttccttggaatttcattcgaacataagacaagtacgaccacatgggtggaatgggacacccctggctgagtaactagcttatcgggggagccatgatgccaagagacatgtggattcgccggggtggtgtcggggaggacccctgggcttcctggcacagtatggtctgggacataatctggtgttggtctgggatccctctcgttggcatatggtgaacctgtgtcggctttcgaaatgccttgtcatgaaagccttaaggtctctagtcgtggccgttctgcacgggctggatgatccgggttagtaatgtcgtgtgggaaaagtgtaccccctctgcagaggttattaaaacttttcgaacagccgtgcccacggtcatgggcggatgtgaggtgattcctatcgtagtttttgtttgactactgccttgtgaaatttgctgttgtggaatgggtttgatgtttggaaaatctgcggctgatgggatcagccaggcccgggtggccgtttgaaagctgttggccgggtgccaatcttgatcaattcaaaagactgaatcattgcacatactccgaccggacgagacgcactgtctcatccgtgtcgtttgagaagcactcccttagttgtttcagaaaagagtttaaataaaatcaatcgtaaaaacaacagcctttctttgaagcctgcattaaacacttgtttcccatggcttgctgagtactcctgtactcacccttgctctatataaataattccccccagttgctgaagaagatgaagcggatcccgctgacgaggagttcttccaggagcaagccggctacgatgagttttagggtttcggcctagttcccaagtcgcgcctgtgatgtttggtccaagtcttggcttccgcttcccttttgtaatgcagttgtgagctcgggatctgtccgctgcccagcatgactgtactcctactctataataaagagacctctgttgttgtgatattccgtcttcctgtgataccagcactgtttcctgggactggtatcggttaacaggttaatttggagcatcacgggctagttccgctcgggactagttcggggcgtgacactaatgctacactgtatcatatgctttccacacacaaatatttactcgcaagtcgtgcgtatttggaatttagatttttcaaaagaaagttcaaaccatttgcatacttgagatacaaaactcaaaacgaaaattgagatcgagttgtagagtttgacatatatatattataaaattcgacaaagatcaatgatcctctgggcttttcacgtgcaggcgcccccggttccggaatttctgccacgccgctttcgactgacaccgtgacacgaacccacaaaagccgtcagcgtcacaaaccccacttttttcaggtgcatcgccgcaaaaaccccaaccgggctgtgacctcgccggagtccccaaacctcccataccgctatgccgacggcggcggcggcggccacggcgtcgctgcgggtatccaacatcccgccatcggccgtcgccgcggagctgctcgccttcttcgactccgccgtcgccgtcgccggcggcgcgttcgcctgcgagatcgcggcggcccaccgcgggtggctcagccggggccacggcaccgtccagttcggctccgccgcggcggccgctgccgccgcgggcctcgcctcctccggccgcctcccccgcttcctcggcgccctcctctccgtctccccttcccccgtcgacctcctcccgcgcgcgtccgacctctccctccgcgcggccggcgcgggcctcgtggtgggcgaccgcgtcgccgagcgcgtgttcgaggccgccgacgcgtgggacggcgtgcgcgccgaggtcatcccggggaagcggcgggtggacctgtacctggagcacgattcccagaggtacaagctcgaggtgctcttcgaggacatgaaggattgcctcgggtgcaccctggacgggatgggcgccatcttgctgcaggtgagctgccgaccgtattgctctttgtagtactatatgctattgatacactagtcactactagtcagacgttgctgtggcagagtgttgacaacaagtgttctgtgaggcaaaagatggcatgaagataatacgttgatgtgcattttttttcccgtatgtgtcaccttgattttgcgctcagtagtaaggccgcaatagtagattagtagttcatatgatgtgcttgaagtcatggttcaatctacagctgttactccctctgggctgataatacttgtcgttttggataagggtgaggtcaaactttagaatctttgattatgaattatttttaaaatatttgtctttcaaatatggtgactacatgtataaattagtcttaaaaagtactttaataatatcatatatttgttaacacttttatacatattataatagaaaataatggtcaaaattgttttttggagaccgtgcccttgtccaaaacgacaagtattatcaacccggagggagtagttctcaacttttttcaaagattatgttgatttagatcttactcgttttattaaatgtgacctagctacccaaatgatcgcaagagcttttttacaatataagatttagttaatttttacttctttacgcttacaaaatcatgaaacttttatttacttgacatatttgagtagattttacaaatggtggagtaaaacaatctaaaaaaagagtagcattcctatgccaaacaacattaccattagcggctaaattgttgtactataacctcttggactacgatttcagatgcaccattctttcctttttgtatacaatttttatctgacaaatatactgtttacttctaatttttgtttcagctcaattatgcaccaagaatacacactgcaatttctgggcctgcagttaattcaaggtttatggatgaccgctttcatgcatgcaaggaggatgctaaattttcctgggtcagggcacttgattttacacccaattattcttttgggaggtgctctactcttgtccttaaactgggtaaaagtgcattggtgtctgatattctcaaaagtttacctttctcaggaaatttaggggaattgactatgaattcaatggatggtgttggtgcctcctccaatgtggttccccttgttcattgtccgagggactattcagtgccttatgaagttctgtttcgtctgaactctctcatgcatatggggaagatagtcgccaagcatgttaatgccgatctgtttaaagcccttcaagaactaccggttgatgtctcaaggagaatttttgagaaaatgcacaaattagagtctacctgctacgggcctttacaatttatccaacaggaggcttatagcatgaagagaagccataatgttttgctctccaatgaaggtgaaggtgaaggtgaaagaaaattgatgaagtgttatagagttaacataactccctccaaaatattctgctttggacctgaagaagaggttacaaattatgtggttaagcatcattctgcatatgcttctgactttgtgagagttacttttgttgatgaagattggagtaagctttcttctaatgcaatctcagctagaattgaacaaggtttcttttctaagcctttcaaaactggtctatattatcggattctctccattctaaaaaaaggattttccattggtccaaagaactttgaatttttggccttctcagcaagtcaacttcggggaaattctgtttggatgtttgcttctaatgcttccttgaatgctggaggtataagaagatggatgggccactttgagaatatccgttcagtttctaaatgtgcagctagaatgggtcagctgttcagctcctccaggcaaacatttgaagtcttacgatgggatgtggaagtgattccagatattgagatcacaactgatggctccaaatacatattttctgatggtattgggaagatatctttgagatttgccaagcgagttgcacaccacgttggattagatcctactaaccttccttcagcttttcaaataaggtatggtggctacaaaggagtcattgccattgatcctatgtcctctattgatctttctctgcgtcctagtatgaagaaatttgagtctgagagcaggatgttgaacattacaagttggagcaagtctcagccatgctatgtgaatcgtgaaattatttctcttctctcaacattgggtataagggatgaaatttttgttgcaatgcaacaagatgagatgcgtgaaacagaagaaatgctaaccaacaaagaagttgctttgtcagtcctagggaaacttggtggttctgaaacaaagacagcagtgaagatgttgctgcaaggttatgagcctagttcagagccttacctgtcaatgattcttaaggcccatcaggagaataggcttactgacattagaactagatgtaaaatacatgttccaaaaggccgtgttcttattggttgtttggatgaaacaggtgtattagaatatggtcaggtttacattcgaattacaaagaacagcaaagaacaaaaggacagtaatcaatcatatttttataatgatgacgggaaaacagccacagttgttggaaaagttgcaatcacaaaaaatccgtgtctccatcctggtgatatccgagtacttgaagccatctatgaccctgatttggtgggcatggttgattgtcttgtcttccctcaaagaggagaaaggtttgtgatactgaaactgaatttatctcttaccttaatgttttttaaagtttgtattgctttgcccatggcttcaatggaaggaaaggagtccatcacttctctattgaattgaatcaccacgttgtccagcattatcttccttgctaggttccttttttattgtcaaccttatgaatgaatgctgccaatgatttgcttgtatttgatgttgatcaggcctcatccaaacgaatgctcggggggagatttggacggcgacctctattttattacttgggatgacaaacttattccagagaaagttgatacacctatggactacacagcaacaaggccgcgcataatggatcatgttgttacactcgaggtaatgcctgactaattgttccttttcccctttttgctaggctgttgtttctcatttactgaaggatttctttttgttctttactaattcaatcttgatagttgcaaaatgtcaccaattatggactgtagcattatagtcatatatatgggcctgaggcaccttttaaaaatgtatgcttgcggttaagggcatgaataaatgcattaggacaatatgtgcatatgttccatgaaacatgtgatgctaataaggttatgcaaaccagaaagtacaagcttggagtgagtttctaactcaactagtcaactcactcaggatggtttaacaattaacagaaaaactggtggtcattgatctaaaagtaatatatctacgtgaacaccaatcattgaaaagttttgaataatttcaaacaagtatgcactgaccatacacatttaacaatagtatttagaaattttgagagctttattcagaaaagaaaacagcatccccaaaaaaaagaaaaggaaacagcaaatacttgcttctgtgaaaaaagaaaggcctctggaacataaatggcaaatcttattgagtttatgagtatagacttttcaaagttgcctcatgggtgaacaaatgcatatctcctctcaaccatggtgttatactcacctgagtgaaatgttttttaaaaaaatgtctgtaactgcaggaaattcagaagcactttgttgattacatgataaatgactcgcttggtgccatctcaactgcccacttgattcacgcggaccgttcgccactgaaagctcggagtcccgagtgcctccagctggcaactctgcattccatggcagttgacttcgccaagacgggagctccagctgaaatgccgcgaacattgaggccgagggagtaccccgacttcatggaacggtgggagaagccgatgtacatctccaatggtgttcttggcaagctctaccgatcagcgatgggtcacatggagaaatcaggagattcaggagctctctcatcatcctcagcacaaccaagccccacatacgatcctgacctcgaggtccctggctctgacgaattcctgcaagctgcagaggagtactacgagctgtacgaggagaaactgaccacgctgatgaactactaccgtgcggagctcgaggacgagatcctgacgggcaacatccggaacaagatgctgtacctgaagagggacaacaagaggtacttcgagatgaaggaccggatcgtcgccgccgtcgacgccctgcacagggaggcgaggggctggctgctgagctccaggaaggaagaggacgcgtcgcggatggcgtcggcgtggtaccgcgtgacgtaccacccagaccgccgccgcgggaagcggttctggagcttcccgtggatcgcctgcgacaacctgctggcgatcaaggcgtcgagccagctcaggcggcggcggcagaaggacgatgactccaccgcggtggtgcagatggactgcagcgcctgatgtggcagaggattctctgactttgagtgactgacatgtgggcctgctggataagggatccatgggtcagtgacaagttagagggaaataaattagaggttctctgacgcgccgtcctaagtgaactttcaactgcacagttcattgctgtgcgcctgtgcctgtacgctgtacaaatctggttcgactaatcttagctgagctgaacagcagagctccggctcgcaacttggaagaggaaagagtttgatgatgaacacctacgtagagtaaaagttcctcttcctaataaaagagtcttagtgctgatctaccggtaaggtggaggcttccatttcttgttttctgcgaaggaaagaaacttagggtgtgtttagttcacacaaaaattgaaagtttaattgaaagtgaacgatgtaacgaaaaagttggaagttcatgtgtgtaggaaagttttaatgtgatgaaaaggttactccctccgtcccataacataagggattttgagtttttgtttgca

SEQ ID NO: 904 - DNA, 6779 bp, Oryza sativa
  source 1..6779: mol_type = genomic DNA
ataacatatatatgtataaatacatatatattatgcatgtacatatgtattgaaacatatataaatataatacaatatatatatatatatatatatatatatatatatatatatatatatatatatacatatatatgtattgaaacatatatatgcatggtttaaatatatatatataaaccatgcagcaacagggccatgcaaaaaaaaaaaggtcagctcgatctttagtcccggttggtaacaccaaccgggagtaaagatggcttagccggccacgtggctagtcccggttatttcaccccggactaaagatagcgatctttagtctcggattggtagtcccggtttggaaatcgggactaaagggaggttacgaaccgggactacaaacgctttctccaccagtgatataaatagatgttatagcattgccaaaattttgataaagtaatattctaaaatttagaagttgtttggttgtactcatattttagacttcatttagaagtcccttatctcaagtttattttccatgcgcacactttctgaaccgctaacggcatatttttttttaaaaaaaagttataaaatgattgttttaaaaaaccatattactctttttttattattttagataatacttaattaatcttgtattaatccgctgtttcgttttatgtgcaatggttcctaacacctgagagcgggtataatagcagactataagccagctgcaaacatattttaagtagataaatgaggagagagaatggcagcgggctacagatttgtagccagctgcagcatggactccaagacgcagtgtgtctatgacaggtgggaccaggtattaatagtgtagtatgtaactattctaagctattagattagctatagatgaattggagttagtagttggctatcctattgaacttgctctgatggcaaacacgtacggcttgccaaaatttccacaatctcagaaccaaacagaagaagagtggagtatctatcagcatttacgttgatatttcttttggcttggtaaaagataggagtactgtagtacaaaacaagcggccccttcagcttccaaccttgcaattaaacatcagatgtcttcagtgattcctcctgaaaaagagatctcttcagtgcttctcaccatctttcttgctccatgcattaactcccttctcatcctcctgatgctaaacaattaaactaatcactcatcactcttcttaataaataagaacttttttttaaaaaaaattgcaaacaaaaaacttcctctcttttcaaataatgatataccaatcttaatttgacaaaaatacaacatcctttaaaagctttttactcccggtgataaacataaccgtacaattataactaaaataataataatttaaacacgcaattaaatcgtctctactctccagtactgcactaaacactgacatgtggggccagacacacagttcgcacccgtcctcttcgttggtgtcccctcgcttaaacccctccgaaatttatttactcatcaaaaatttaataaccgaatccgattgatcttcccctctctctctctctctcactcctcccagctcccacccaaccacccaagccatgcgatcgccgcgcggcggggcggccgcgcagccgtcggggcggcgcggcgacacgacggcggcggcggcgggcgatctggtgacgacgcaggtcagccttggcggcttcgacgccggcgtcgccgcgggggacctcgccgacttcctggagcacgaggtcggcctggtctggcgctgccgcgtcaagacctcctggacgccgccggactcctacccggacttcgccctccccaccgcccccgcctccgcctcggccgcggccgcgccgccgcggtacgaccgggtgcccccgcacgcgtttgtccacttcgcgcgcccggagggggcgcgccgcgccgcggacctcgcgggggagaccaggctcatcctgagggggaagcccctgcgcgtcgcgtccgcgccggacagctcgctccgcgtgtcccgccgcagcagcatcgcgccgttccggttccccgacgtgcgcctcgaggtcggggcgctcccgtcgcccggcgcgttcctcgccgcctggcgcgggccggacgccgggctcgacctctccgtcgaccccttcgacgggtgctgccgcctcgtgttcacccgcgacaccgccttcacgttcccgggcttccgcgaggtcgccgccatacgctgcgacgtcaagctggagttccccgtgcgcgacgtcctggaggtccgcctgtaccgcctcgactgctcgctgctcctccgcctcgccgccgcgccgctggtgcactaccgcaccgccgacgacgacttccacgagccggtccccttcgacctgctcgacgacgacgacccgtggatacggaccacggacatcaccccgagcggcgccatcgggcggtgcggggtgtacaggatctccttctcggcgcgattctggcccaagatggaccgcgcgctggactacatgagggagaggagggtggcgatcgtcgattgcggcggcggatgggggccgcggcgggggctcacagtgcgcgacgagctggagttcggggagccaatgcaggacgtcttcttctgcctgcagcacgccgaggggctcaagttcccgctcctcttcatggtgaacgcgttggtgcacaagggaatcatcaaccagcaccagctcacgcctgaattcttcagcctgctggggagaagcgaggagaacgtcaatgtggctgcattgagggatttctggggggacaagttcccagtgtttgatgcgtgcgggaggctgaagaaggcactgaatcgggtggccaggaaccccaaacttctctgcagcaaggtcggggatgaccacgcggaggtgcggaggctggtgatcacgcccaccagggcttattgtctgcctccagaagtggagcgctcaaaccgtgttcttcggcattaccatgaggtggctgacaggtttttgagggtcacttttatggacgagggtatgcaggtgctgaacaacaatgtgctcaactccttcactgcaccaattgtcaaagacttgatgtcgaattttttccagcagaagacaacggtgtacaagcgtgtcaggatgttgttgacggagggtttccacatgtgtggaaggaagtactcatttctcgcattctcatcgaaccagttaagggacaagtcagcttggttctttgccgaggacagaaagacaacggtggaagcaattaggaagtggatgggacggttcacaagtaagaatgttgcgaagcatgctgctcgaatggggcagtgcttctcatccacatatgcaactgtgacaatgcggccggatgaggttgatgagagttttgatgatgttgtgcataatgagtacattttctccgatggaattggcaaaattaccccagatcttgcattggaagttgccgagaggctgcagctgacagataacccgccatctgcttatcagatcaggtttgctggcttcaagggtgtcatagctgtctggcaaggacatggtgatgggacacggcttttcctgaggccaagcatgaggaagtttgagtctaaccatttggtgttagaggtggtctcctggacaaagttccagccaggattcttaaatcgacagattataatattgctatcctcactgaatgtcccagattctatcttttggcaaatgcaagagaccatgctttctaacctcaacaatattctatcagacagagatgttgcttttgaggttttaacaacttcatgtgctgatgatggaaacactgcagcattgatgctcagtgctggctttgaacctagaactgaaccacacttgaaagcaatgctcttggctataaggtctgcacaattgcaggatcttttggaaaaagcaaggatatttgtgccaaagggaaggtggttgatgggctgtcttgatgagcttggggttcttgagcaagggcagtgctttattcgggcaacagttccatcattgaatagttattttgttaagcatgggtcaagattttcatcaacagataaaaacacagaggtcattttgggtactgtggtaatagcaaagaatccctgtcttcatccaggggatgtccgcatccttgaagcagttgatgtgcccgaactgcatcatctggttgattgtttggtgttcccccagaaaggtgagaggccacatgctaacgaggcatctgggagcgatcttgatggggatctctactttgtgacatgggatgagaaacttatacctccaggcaagaagagctggaaccctatggactactccccacctgaagcaaaacaacttccgcgccaagtatctcaacatgtaagttcaataactcttgagatgtcagcaatgtcccataattttttgtttcctacatacatgtcctttttatacgatggataaccctcctttcattggaagcatatatgggttttctttacagaactgagataaagaaattaaacgcaagctatggtcgggcacactggcacaccagcaaaaacagggaatagctttagaatctcagatatattacagcaatcaaaattaagtccaaaccagagaggtcctcctagcatttgtaaaccttataggcatcatctccctgctgaactaccgaggccatttcttcacatttgtgacttccctatcttctttacgtagcattaccttccgtttctgcaattacaactttatataaagtttaaatcaaccagctgttgaaggagtacatgattaattgccatctgtgtttctacctgtccaaatcacccctgaaaaaacatcaaacataacattttcaaccatttagggcctcacacctggatccaaggaaatccttgattggagttgggtgctctgtcctatctaagagcttttgatgcatatccatatgaaccctgataatttgcatgtaactagcaggttatcgcttgctcaaacgctgggcaactagtctctagtcttggtcgagtgtgtggttgacttggtcgtggacatgcttggttcttagatcgtgttttgtattcagggtttcttataccctttctttcttgcactgtccatattctaatgcaaatttagaagtaatgattttcatcttccttgttattttattatttggttatactatttgtggtttctagctgtcaacaagtaatggttgtggtttccttcatagttttagtatggttttgtgatatttacgaagttaagctttagcaaactattagcatagcatggttggttagcgctcattttattcaccatctgaatttacctcatgttatcatatattcctacttggcaagctgccaacttcaaattggaatatggtgatgtatttacaaagttgttaccatgtagattgttatttggatttgaaatctggcattggtgatacattttctccaatcgcatatgcatatagctgcttaaaaaactgactcatattaattcccctagtttctgcaaattgtagatttcttgatttgtgggcaagtatctattgctataatgcatatcattgactagatcttgtttttgtaacaggatatcattgatttcttcttaaagaacatgataagtgagaatcttggtaggatctgtaatgctcatgttgttcatgctgatcttagcgagtatggtgcaatggatgagaagtgtattcacttagctgagctagcagcaactgccgtggacttccccaagactggcaaacttgcgataatgccaccacaccttaaaccaaaagtctaccctgacttcatgggaaaggaagatggacaatcttataaatcagaaaagattcttggaaggctttatcgttcaatccaagaggcctccaatggtgatgtggtgtcacaagaggtttgcactccaaatgatctgccttatgacatagatctggaagttcctggtgcatcagatttcctcgcgagtgcttggcaatgcaagtgttcatacgacgcgcagctgagtgcgctgctcagtcagtacagggtccgcactgaagctgaacttgtgacagggcacataacgttccttgttaagaacagcagcaagaagcaaggcgacataaaggacaggctgaagactgcttactctgcactacgcaaggagttcaaaagtacctttgagagcatagcatcggatcaatgcgagattggtgatgacgagaagaatctgctgtacgagatgaaggcctctgcctggtaccaggtgacctatcaccccaaatgggtggagaagtcgaggggcattctgggcccagatggtgaggaaataccggcaagccttagctttgcatggatcccggtggattacttggcgcggataaagctaaggtgccatggtaaagtgagagttgaaggccaaaagcctgttgaaaggcttgcagcatacatctccgagaggatatgatgaaacaatgcaaaggtcgcagtaagaccactctgccattcgtaatgccggttcaaagggcatgcgtacaaaatatctgagtttttttttcttttcatttttgttcacttcactgaacttgatctcccgaatgtttcagtgtgcttttgttccttcttacatgcccctcaagcctgaaaaactgtacgtttcagttgagggctgtctatattatgaaatgcacaaatatacgctgcctgcagcttttggcaata

SEQ ID NO: 905 - DNA, 7194 bp, Oryza sativa
  source 1..7194: mol_type = genomic DNA
aacaaccgcacataaccatggtcgttaatgtattaacaattgcacataaccatggtcgttaataaagtaacgatgacatattgttcctgtcgttaatgaaataacgatgggaaaaattacgtggtcgttaatactattaacgatggagccttcaatgactagaactttgtagtcgttaatgaccacatttggacctttaacgaccacatttcccatcgctaataatcgtttctctagtagtgttaatcgccattgatgcatgggtaattgccctaccaatctcgcattcatgattttcacatgtctcaaacgtgaagagaacctatcatgcataaactcttactgtcactacataaatatcaaatcagggtgtgtttagttcctgaaaaaagttggaagtttgaagaaagttgagagtttggaaaaaaagttagaagtttggctgtatttagatccaaagtttggatctaaacttcagtctttttccatcatatcaacctgtcatacacacacaacttttcagtcacatcatcaccaatttcaactaaaatccaaactttgcgctgaactaaatacaacctttatgtgtgtgggaaagtttttgatgtgatatgatgtgatggaaagttaggaatagggggaaaactaaacacggcttcagtgccctcacatttcatgtgaatggatcaaagagggtactagcgaagtactataataaaatactacctccgtcccattttaagtgcggccatggtttttcgcgccgaactttggccatccgtcttatttgaaaagtttttgaaaaaatttaaaaacttgagccacaagtaaagtactattcatgttttattatctcgtaataacaaaaatactaattataaaattttttcaaacagttaaaatgaaacacagggagtagatcgataaaatcaaatcacttgcttagtcatgacaaattgattgctcacgattcagcttctttcataaataatgaaacctttgtacttcggcaacttttaaagattcttcataaaacagcagcaacacgaaccagacttctcatgtcttcattcaattcaacaccaacaactagacaaagcttaaaggtcccctgacaaagtgccaactctaagagtccccatccatcactcacagtgacatgtgggcccagctcctcacgttgaccgcagttgactcgttgacagcctcccgggccccaccagacagcgcgaggtgcgcctcctctttaaagccttcgtaaacgaggaaggcgaaaagcgggggggggggggggggggggggcaacgcaatgcaccacggtgaccaaacttaccttaactgaaacatggggcccaccagtgtggaccccactcgtcagctacccggggtaagcggggtggatcgggtgaggaccaaacgagcattccgtgcggccacccacccggtgcggttaccggcgcccccccctccataaaaaaccaaccaaggccacaggcgcgggtccgcttcggcttctctctctctctctctctctctcctcgaaaaccccaacacacacaacgcgaaccccactccgcgatggcgtccgccggcgatcgccgcggcggcggggggcctcccggctccggcgacgactccggtgaggccccgctcccgtccctctcccttgtcccggtggtcggatggccgatccccgcaatgtcggcggcggatgctgctcgttcgcgcgtagggtttatgggggtggttgggttgggttgggtttccccggggatcggtgcgtggttggcgtgcggggtttttgttttcgtgggggtttcgagatgatgtgtgttgcgggggggtggccgcagcgatgcggggggatttgggtgcgctgcgcgggtggattgttcgaggtgattggttctttcattttttttttgggtcgattggggtgtgtactgtgtagggggtttagtgccgtggtgctttgtgtggttgcggattcggtggtctcgtccatgtggttggttcatctgaaggcgatgggttttggtttgatttggttagtttgatccttctgtctttttagagcttcagagtttggtgttgttgggtatttttgggttcctttcggtgaggatttgtgttcactttctatttgaaaaaaagagagagatatatacgtattcaccttatggagcattcagttgtaataggtgggtttttatttgattttgcggctggttcattgtgctaaatttgtgttgttgaaataggatgccgtatgtgattattgtaagatcattgattattgaaataggatgtatgtgattattgtatgttttgaatgttcgcctagcttgctagatcgataattatgcccacatgcttattgtaagtttgtagctatgttaattttgcttccctgcgctcttaggtttatggtgtgacctccttaatttgtgattgatctatgcatgtgtgtgtttaggtctttactactgataaaattcaaaactcttagaactttgcaaatactacttcatgctgaatgattgctctactcagtctggtcagaattaatttacattttgtatagaactgttgatatttatctctatgaatattttgattggacataacattacgaaatatataatgcaatcctaaggtagtgtttacaattgcatttggagaccttttgatatctagtacatatttgtgactggagagagtgttcagtgttctgtattggaaccttttattgctttcatcatacataagagcatttcataattattaatcactggccttcatcagttttggtgtgtgtcaaggagctgcactcgtgaatctgtgcgtgcatgtgcatctgccttataatcacgtgaaaataacatgttatactaatttatgtaaatgccttgtatccagggggtggttgggagactgttgagaagagggtaaagaaaccagcgcaacaagttgggaaggggcaatggggacaatggaattctccaaatgctgcacctgcacctactgcaccacggagtggctctggagcttttcatcattctggaaacactttggttcgacattctgatcgtaggccagcaagaggcactcctaggccaccaccacaaaacaggtctatagaggcagaactgcaagcaccgcacggagttgtgactgcacctctggcaaatggttggcagtggggagccaggtcttgcccacctggtactgaaagcaaggagggtggtcttcctttgtctggttgtgatcctgaaacagacaatgctgaaggttatgacacatcggacgatgataatgatgatgatatgagtgacgatttgagtgatgactatgattctgatgcaagtgagaaaagttttgagactcggaaaaatcacaagttgttcaaaggtttcttcgaagtcctggaggcgttaagtgtagaacagttaaatgaaccaactaggcaatggcattgcccagcatgcaaaaatggacctggtgcaattgactggtacaaagggctacaacctttgatgactcatgccaaaacaaagggttctataaaggtcaagcgtcacagagaattggctagtttattggaagaagagctatctcgcaggggaacttcagtggtaccatctggcgaacaatttaggaaatggaaaggattgcgggaaagcactgatcgtgagattgtttggccaccaatggtggttgttatgaacactgtattggaacaagatgaggatgataaggtaacattttcatttgattgctgttgagtttcagtatagatctgaccagtttttctgcctgacttatatctttatgagcataacttttactcttatcttctattcatcattctgcaattacaggtcttgtctgccacattaaatttgtagtaaatatacatatttttggctattttcttgcttatttttttgtatctcgtaagaacattgagttgattctactgatttgtttacctattagtatcaaaagcaatgcacattcctcaggagcagttactatatgttgacttttgttactcaaatattatatattttttcttatgcactttgatataaattgattagcaagatttatcctcttcatcacacattttggttgaatttattatgttttgttccagcagatatttgttttctcaagtgttaaaacttaaaaaaaaaagacttcaaaattcactctctgttgtgattttcttgcatttatacttcattgtgaaagaataaaaatatgctgagcagtcagggttatctaggcgttgttcattaaaatgtatttcttattttctttattattgtgaaagaatatctgcttgatctattaaatgtgtctgcttttatgtttttattgcattctaatatctcctctttgtctcaatctagtggaaaggtatggggaaccaagagctaattgattatttcagtgaatatgctgcaagcaaagcacgccatgcctatggtccaaatgggcaccgtggcatgagtgtgctaatctttgacagctcggctgtgggctatatggaagcagaacgtttgcatgatcactttgttcgtcaaagaacagacaggaatacatggaacagtgctcacaaggttacattcttacctggtgggaaaaggcagctgtatggtttcttagctacaaaagatgacatggagacattcaatagacattgccacggtaagccatttaactatggtccaatacctgtacattaaattaattaacgctgtgtttttggtgcaattgtcattcatctgataaataactggctttcattacttttatctcctgaattctttctgacgccgattattattggtcacctctatgaagtgctcatgccaaatactagcttgcatttttatgatatgctgcatattcctgttcttcatcttcattggaatgtgatcacaattgatattatttaccgcaatatgtttctactaatgcttcacaacaattcataccttcatttcatttttattacgtagcatgttattatagtgtactcaatgctcatcagctgggtagctttctggtagtttatctctactacttgaaagcatgaatgtctaatctcattccattcaaaatgatatttcccttctgattgtaagaagaaaaattctatactcaaggacaatatgcaagggtaacttacctcttcggggacagcaaaggattagatctgtgcttctatattaataaaccttcagttatctattttctcctagaacatggaatcctatgatttatgctaggtatagattcatcatcattgggttcagcaagagtaatgtagcccattaataaaaaagaactgttaatgcaaaaatttaaatgatgctgatggaccctaatattttattacctttgtgcaatacggataggaggcatgtgcttgtcttttgtcttgtatcctttacctagtttcgttttgttgtttttttctaaataaaatacaccatttttaaagtaagaaagatactctagtttgcagatttctttcttttataagaacaattaattcctgagcattgcatttgggttacattcaaccctctacacttcgatagttttatttcttcatacgcattacaacctgtcaatctgtcattcatcatagcctctctgcatgtcagtttgacttcatatttgctatcctgttgatagtaaaatagaaggggaagtggtgcctgcctgtttgtaataaacaggtcctggcctcccaagtattttcacaacaaatgcaccacccatgtgactgtttatgtatcaattgaacatggccatcagtaatcttgattttcttagcttggctatcttatgattgttttattgtaacattaatgcaaacccctcttttatacctattgcaaattttcaggaaaatcccgtttgaaatatgagatgagatcttataatgagatggtggttacccaaatgaagcagatgagcgaagacaaccagcaactgaattacctgaagaacaaaatggttaagaaagagcagcactctaaattagtagaggatacattgagtgttgttacccagaaacttagggagacaatggaagagaatactattgtacgaaataaagccaaagaaaagcacttggagtatgagaaagaggtaacaattgcttaattggttaccctaatgaatatattttttggtaacatttgtatgagcagcaaccagaactgtcatatacttagtttacatatcagaaatattccgagagaacagatttctgcatttgaaacttgccaatttgccattgtcttgtacccttgttttgatttttgttcccttttcaccttgtggttttatacttcgcagatgaagtaccaggaggaatttttccatgatcaaatcgaaaaaattcacaaggccacagaggagaaagaaatcaagtttgagaagttgctgcaagaggagcgagcaaaggctagacaaagtgatgttgactctggaagtactgaagatcgcaggcaaaggtgaacaactagtttaatgtttttttgtgtgatgtcagttaaaattacgatccttagatcactcttctaggagcaacaaatttgaaatttccatttggaatggaaatgctccgcatcaatatataacctagtcgacattgtttcattgtgcaggaaggaaaagattcagaacttcatagactgccaggtgaaggatgttgaggaatttgaagccgaacgagacaaactgatcaaattgcatgaagagaagaaggtgaagctcaagaaggagtacctggcgaaggaatttgagcttgagaaggagctggacacagccctcacttccctgatggataaacacaagccggacatcttcaaatcctccacctcgccttcgacatgaagaactgcggcttaccatacatttcctgctcatctacaatagctaagactcccatttcctaagtacccgtaaaacttctagcgatgcgaaagcatcattctgtttgggtggatgcatgcctttggaaggaaacctgaaccagttccgtattatatggagtactatcagtttatggttgctgatgaactgatgactgtgcgctgcgcttttacagcaagcgtggaaatcgaatatatatctagtttatctcatcattctgctctgcgttgcatc

SEQ ID NO: 906 - DNA, 6921 bp, Oryza sativa
  source 1..6921: mol_type = genomic DNA
tacaatataatcttccatataacgaacttactagctatataatagactttttgtagggaattagaaactttcatatagaaagcaaaactttctttagataaaccaaaattgctaaataggcccacttacataggcatgcttaatcaaacaacaagaatttttttattatttaaccaaaaacttgtttagggcatgtttaaagatagacatatcttagtagttatttagagactattatcttgagactatagatatctaaaaattaatgcacaaaactaatttttaattatcattttgttttcccattttcataagcatagtttccttttataaacactaagagtccgtggtaagccgtttctcagatatcaatacataattattgatatcgatgtttctttctcttttttctgtttttatgtaatctaacttacaatctcatttttcgcttatgcttatacttacaagccaaaatttgaattttcaaccttaaatttggagttgattttggggtccttttatcgtaatttattttccaacctttacttttagatcgctaagaacacatatataaaagttgtattcacaaattattttttatttgcaaatatgccttgaataagccaaaccatggagccattagtatctttgttaagggtgagttcgaatgtaccattttctaacttatactctactttttttttacaaattttctataaaaaagtttctttacatccatattaatatgtttcaattcttttattaatactatttgattaatcatgcgttcatccaccactccattttactaactgcgtggatattagttttcgacccacaataacgaatacagtccatttggctgctattaacgaatctatcaagtatttgaagacaacagcatgcgccaattagcttttccctacaaggacgactccacatcatcatgtaggtattgtaggtgtcaatttggtaccttgttctgctttaaactccatcactaggctgccccatcactaaagcaaatgcaaaacactctcttttccctttaagagcccctttcaattaaaggatttatatagaaatttctcataggattgaaatcctatagaaaattttcctatttgaccctttgattcaaatgatagaaactttccaaatcctatgaaattcctatggaacgacacattgtatgtggattttggaggaaatttagcaagagcttcaacctcttggaaaatttcctttaagtctatatctctctcatccgattcctatgtttttcctgcgctccaatcaaacaacaattcctatgttttttctgtgttttacaatcctctgttttacacttcaattcctgtcaaaatcctatgtttttcttattcttttattttttcaaccctgcgattcaaagggaccttcaacctgcacaagtgtgaagtcgagggtgactcagctcaactctactagtaggaagtaggaatgcgaagggttcgtttcgtttccacaccaccattggtcaagtcaagctgcgcgtccaatcccacaactcactgacgcgtgggcccgggtcgtcctcactactactactgtgcagtgcagccagcactagtgctctcctgctctcctctgcttctcttctcctctcctctcctcaccgggagagtggagaccctcgagatgcccggcggtcgccgcggcggcggcgggcgtcctggctccggcagcagcagcaacggcggaggctccggtgagcacccctcccccgcgcgctcgcgccggcggcgccaccctctccgccggtaggattcagggcggtggcctcgtcgtaggcatgtgcgtgtatatgttttttttttattattcccgtagattttgtgctgtgcatggcctgctccgatccccagtttcctgggcctctttgatgagactatggtttactgcattgcattctgctccgtcagtaggaagtactacctccgtccgataataattgcatttctaccattcaaactttgtcccataaaaaatgtatttactataagatgagacccaacaaatggaatttgtaccccaactttccttttaattaatttgtagtagtagtaaacactatccggggaaaaaaagaaagtggcaaagcttttgcccttccttcagagaaaaaaatatattattattatttttttattagatatataaaatcgatcaggttagattcatcttggatctcatattttgctaggaggtatggtaagaaattttagtattttttcacactttgataaatatatcgcggtacttacttaatcattagtagcaaaccttgaggttggagactgtatgatgctaagtatgtgagttatgacttgataataagtatgctaagtagcaaacatgagaagttggttgcatgttccacagtacattttttagttgttcctttgtcgtacattgacacacataggaaaatatcatattactttatctaactgtttttgatgtagggtatagttgggttgagaagaagtcgaagaaatcggagaaatcagttggaaagggacaatgcgcaccatgtacttcttcaaatgctgcacctaaacctgctatggcgtggcaagcacggagtggcaatggatctttacaccctcctggaaatggtcgggttcaacattctgatcataggcctgctgccagaggcagtcctaggtcactgccacaaaataagcatacagaaacaaaattgcaagcaccgtgtccagttgtgactgcacctcttgcaaatggtttgcagtgggtacccaagtctcgctcatctggttctgagagcaatatggatgatgctcctacatcaggttctgaccctgaaatggacaatggtgcaacacacccagttgtgactgcaactcttgcaaatggcttgcagtgggtgcccaggtctcgctcatctgactctcaaagcaacaaggatgatgctcctacagctagttctgaccctgaaacggacaatgttgcaccacacccagttgtaagtgcacctgttgcaaatggcttgcagtgggtacccagatctcactcatctggctctgaaatggacaatggtgaggattatgattcatatgacgatgattctgatgatgatatggttgatgataccagtggtgactttgattctaaggcatctgagaaaaattttgagactcgaaaaaggcacaagctgttgaaaagcatttttgaacttctggagaagttaagtgttgaacagataaatgaaaagactaggcaatggcattgtccagcatgcaaaaatgtacgtggtggagttacctggtacaaagggttacagcctttgatgaatcatgctagaacaaagggttctaagagggttaagcttcacagagaattggctgcattactggaagaggagctgtatcgtacgggaatttcaatggcatcatctggcgagttctttggaatctggaaaggattgcgagaaaacactgatcgtcctatagtatggcccccagtggttattattatgaacactcgattggaacaagataaggatggcaaggtggtgttttctatttcttgctcgagctaaaaaatattttgcttttctatatcattttctgttgcattgtatctggaagttttttgttgtccaattgtaagtcatgttgtttatttactgactatggtgttgtattaggtcgcaatatttatttcttcgaatgttattgaattttgagtaaatttcataaaccccacctgttatggtccaagttacacaaaaccatagggattttgacacgtggcacataaccccgatggtcataaagtttcacaaaaccacactattagccattttgacatactcctatatcaaatattttaaaagtggatgtaacatttatatgatggatagaatcctcataaatttgagatatgattgtaaaactcaaaagtgttgtagatcaaaatcaaaatgatcaatagtgtggttttgtgaaactttaggaccataattcctgtggttatatgccacatgccaaaatctctatggttttgtgcaacttgtaccataataggtggggttttatgaaatttactcttgaattttagttatgggtaatgcacatggattctactaaacctaaattgtacacataactttatggctgtccactattctttctgtaatatctgatctaatcagttgtactcaatgtgtagcaaaattaaagaaataagactgatttgttttcatatggttctattgatttttttttatctattactacgtatcattaaataaaatgtaaatgcatccttcaggagcagttaagatggcaaatgtgatggtttccattacttaaatatcagatagctgtcatatgcattgcaatatcgatccatggacacggtttatctccattaccagtttattttgtttatcattcttatgttagttattattttatgtgccagcaaacatttttctttgtgttgaaggtttaaaatatttacaatattcaaataacataaaactgcaagaaaacatattgtagttattctttattatgttttgcttgcattcatactccactgcaaagaaacataaatatggctactaattaggattgtctaggcatacttggcccaaccagttgaaggtcattgtacaaaaacatccatttgatctatcttttaagctgtatgaagctaagatttacttcattctaatttatatttctcccttgacttgttccagtggaaaggtatgggaaacaaagagctccttagttatttcagtaaatatcacgtgaaggaagcatgccatgcttatggcccagatgggcacagtggcatgagtgcgctaatatttgaaggatctgccgtggcctataaggaggcagaacggttgcataatcactttgttgatcaaagaacagacaagtatgcgtggttgaatcataggatcgtcatacctggtgggaaaaggcaactgtatggtttcttagctgaaaaagaagacctggaggcgttcaatagacatcatggtataatgtttaacttcttttcatatataatgctctgaactctgtgcaattgtatgtgtttgttgtcttttgttataagcatttaaaatggaaacatgatccatacatgttcgcatgtttgaaaggtgaacattataaaatatcattttggaaccttttattgtacatgagagttggagtattgtcagaacgaaatgcatcacctgtatgactgtgtattcatctaatttcctggttttcctgacagattagctttgctgttgcatgtcaatttcaacataaattcagactatttttttttaaattttgtatgattttcaggaaaagactatttgaaatacgagatgaaatcttataacgagatggtggttacccaattgaagcagatgagtgaagacaaccaacaactgaattatgtgaagaatgagatggttaagacagagcgacattctaaagaagtagaagaagccttgggtgttgagacccagaaacttcagggagcaattgaagataatattattttgaagagaaaaaccaaggagatgctctcagagtgcgtggaacaggtattgattgcttaatagttaccctggtgtacatattttctgctaccacatgtatgatctgcaaccagaagtaacataactataaaaatctgcttggacactgcctcctaaaatcttaatacaaagatatgcatcgctcttacgtattcctgaaaaaaatctgcttggacaggcagtcttctgcaattaaaacgtttgccatagaatcccttttgctttgtctcatgttaaccttgttttgattttgtctcctttcctcaccttctatgcagatggagtttaatgcgaaattttatcatgaacaaattgaaagacttcgcaaggacaccgaggagaaagagaatgagtttgagaggttgctgcaggaggagctagcaagagctatagagtgtgatgttgactctgaaactacagaaaattgcaagctaaggtgtgaccaatacgtggttgggacttgggagcagttgaaaatttgatagtacttctgattattcttctattgatcaaatatagatatggtgtctctgtgaatggaaatgctccactccgatatatcactaatccaaaaatattttgtgcagggaggaacagatacaaagaatcatagattgccaggtgaaggatgcggaggagtttgatgctgaacaagatgaattgatcaaaacacacgaagagaagaaggcgaacgtcaagatggagtatatggcaaaggatgttgagctcgaggaggagctttatgccgctctcacaagtctgatggagaaacacaagccggacatcttccaaccgtccagcccttgaagagctgcaggcttgcagctcaccatatatatgccctgctcacaataatctcaagaggtccctctcccaaatgaacttcaatttacatgccgataaattgcttgaaatgctcagaaactctcccgagtggcgtctctgggcaattgtgttgcacccccaatttggtgttttgatctgcaatttttatgcatctgcaaaggtcaatttgattgagttgacaagaatacctgttgctcaactcaaagatgatgtgctattcttgtcaaacatataactctacacggttttgatttcacttgcaagtttgtgaaaataaaagtaaaacagatggttttactttgcaagtaaaagaatttcggaactgccaagtccgtccctaatatttctagagattcagaaacatcacatgtttttgggttactgcaagcatggtttgaagtttggacttcattttggaatgaaaaatctgttcgattgtcatgtatggaagc

SEQ ID NO: 907 - DNA, 8465 bp, Oryza sativa
  source 1..8465: mol_type = genomic DNA
actccctactctcgttttccatgcgtacgtttttcaaactgctaaattgtgcgttttttgcaaaaaatttctatacgaaagttgcttaaaaaaatcatattgaccctttttgaaaaaaaattaatacttaattaatcacgtgctaatagaccgcttggttttccgtgcatagcagatggatcccaaccccaccaacggacacagcctcagaaggacacaaagactcgggttgctctaatagccaacaaacaggaggatgtgcacacctagcaaaagaccttttgggaaacagggacttattccaagtacctgtcacatcggatgttcggacactaatttgaagtattaaacatacactaattacaaaacccattccatatccttgactaattcgcgagacgaatcttttgagtctaattacgccatgattcgacaatgtgatgttacagtaaactttttataattatggattaattaggcttaaaaaattcgtctgcatattagctcttatttatgaaattagtttttttattagtctatatttaatactccaaattagcgtccaaacattcgatgtgacatggatttaaaaatttttagccccatctaaacaccccccctaaatgcgttttgtttgttctcttgttgctttgaaactttctaaggccaaattttccccctaagaatcaccatgtcgtgttgagtagcagatctcagctaattctatcaacgaaatggtatatttacggttctggctaagttctacacagattatttgctcggctattttatcatttatcgtgaacatgcattttaaattactaaacagtattttaaaaaagttatatataagtttctttaaaaataaaataaatctattttctaatattttataaaagctacttcgtaaaacttaattaatcatgtgtcagtggcgattcgtgtgctactaaaataagataaaccaaataatcctatggaataaagcattagatgtaatcgacgataccacgctacatgaaaaaaagtagattaaccgtttatttttttctacatgcatatggaccatttgcattaagaatatttcacaaaagttagggaaacgaattataagaaaaataatatgaccgtcattctccgttttttcatagtctacaaatatttattaataagttgattttgtaataactctatatttaactaataaaaatcaatgtcacgtcaattcaaataaattaatcgtttaaaatccacacgtccctgtctcaaaataataacatataaataaatattataaagatatatcgccgtctaatcgaagcgatattccataattaaccctgcacctctcagggaggtgcagttgagcatttacttcactctttttctcgagaaacccaccgggttgtcgtctggacctgtttgtcagtgactgtcgagagcacgaggtgatgggtgcacgggccttaaagtttaatcctctatggattcgattttttcacttatttttttacttttcggtgaagcccgggaaaaagggcgctccatttcggagatttcgcacttcccaccccttcccttcgcttcctccctccctcgcctccgcctcatcgccgattcaaccgattcgccatcgccccccacctcgccgccgtcgccgccgccgcctcgtaaaccggtgggattttgcggggaggagggagtttggtgcgggagaagggggcggaggagtgggtggttttgttttttttttttttgtattttgtttttgtgtgtgagagaggggggaagggggcaatggagatggacacatcgccatcgtcttcggcgccgtcgtcgccggcggcgtcgtcggactccatcgacctcaacttcctgccgttcctcaagagggagcccaagtcggagccggcttcaccggagcgagggcctctgccgctgccggcagcggcaccgccgcctccacctccgccgccgcccccaccaccgccaccgcaggtgcaggcggcgacggtggcaactccggtgccggcgacgcccgacctctcggcggcggcggtgatgacgccgctgcagtcgctgccgccgaaccccgaggaggagacgctcctggcggagtactaccggctcgcgacgctatacctgtcgtcggcgggggcggccggcgtaatcgtgccggcggcggcgccggaggcctccgcgggggcggtggcgcagcccgggtcggggtccggcgcgaagaagcggcggccgcggtcgtcggagctggtgcgggtgtcctcgctgagcgtgcaggaccagatctacttccgggacctggtgcgccgggcgcgcatcacgttcgagtctctccgcgggatcctgctgcgggacgacgagcgcgcggaggtgctcggcctcacgggcgtccccgggttcggcgccgtcgaccgccgccgcgtccgcgccgacctgcgtgccgcggcgctgatgggggaccgagacctgtggctcaaccgcgaccgccgaatcgtggggccgatcccggggatctcggttggggacgccttcttcttccgcatggagctttgcgtgctagggctacacggccaggtgcaggctgggatcgactttgtcacggctgggcagtcttcctcaggggagcccatagccacatctatcatcgtgtccggtgggtatgaagacgatgacgatcgcggcgatgtacttgtgtacacaggacatggtggtcgtgaccccaacctccacaagcattgtgttgatcagaagcttgagggtggcaaccttgccctcgagcgtagcatggcctatggtattgagatccgcgtgatccgtgctgtcaagtccaagcgcagccccgtcggcaaggtatacttctatgatggcctctataaggttgttgactactggcttgaccgtgggaagtctggcttcggtgtttacaagtacaaaatgctgcgcatcgaggggcaggagtcgatgggctctgtaaattttcgactagccgaacagcttaaggtcaatgccctgactttccggccaacagggtatttgggctttgatatttccatgggtcgagagatcatgccggttgcactgtacaatgatgttgatgatgatcgtgacccacttttatttgagtatctggcgcggccaatatttccgtcctctgcagtccaagggaagtttgctgagggtggtggcgggtgtgagtgcactgagaattgctcaattggatgttactgtgcacagaggaatggcggtgagtttgcatatgacaagctcggtgctcttttacggggcaaaccactggtatatgagtgtgggccatattgccggtgcccacctagttgccccaacagggttagtcagaaggggcttaggaatcggcttgaggtattccggtcaagggagactgggtggggtgttcggtctttggatctcattaaggctggaaccttcatctgtgagtttagtgggatagtgctcactcatcaacagtcagagattatggctgcgaatggtgattgcttggtgcggccaagcaggttccctccaaggtggttagattggggtgatgtctctgatgtctatccagagtatgtggcaccaaacaatccagctgttcctgacttgaaattttcaattgatgtgtcaagggcaaggaatgtggcttgttatttcagccatagttgcagtccaaatgtgtttgtccagtttgtgctgtttgaccattacaacgcagcttatcctcacctcatgatctttgccatggagaacattccaccattgagggagctaagcattgactatggaatgattgatgaatgggtgggaaagttaaccatgtagtcaggctgtctactagaaggcaatactcagtttatcttcctttgttttgatgctttcataatccttctcatggagatttttgaggtgattgctgacaacaagtttctctgatggtaactctcccagtccttccatgatctttttattttgagatttctaggattatgtttcgaactcagtacttataatatgcctttataacaagtctacattacttgtgtgtgaattgcttcaatttgcattttctgtacctccttttgattgacctgtattacttcctacttaattagtattttgtttatctcttgcttattcaacttcattgcatttttcaatgctgggatcatgattcataaattggttgtggtacttgaaaagattgaatgaagtaatgaattggttaaagtgcagccttgtgaagtagtgctcctgggtgcatgcgttccttgccctctataaataggcaacaatctccatacatatgtaccataaatgttatctttgatttactagtcttcatttctttcagtcagaaatatttggattttatcgtactattggtggtcagctgctgatatgtgctgttcaaaaaaaaaaaactagtggtttcaaaatttagtttgaaattaaatatcttataccaattatcatgatgatttctggggatattgttcttcagcctggcttatgttagaatatcaattatatattgttacatttttttgcatcgtttctggaatctggaggtcaatctagcccatatatggtaatacgtgcccatataattccccaacgagctttatggttgttaagtagtaaagttgagtcaagttgcccctctaccgacttgagagttgacactagtctttggtagtatatctgacttttactacatttactggttgcttctaccactcgtcttgcactacatgctgtgctgatggacctaatggaactcttttcttatctcccttcattcagtaataatgggcctgacagaccaagcctcctaagcaactcatcgttgctgccttgcttcattgtgtcttctactgccaacaacttcttgtgccctcaagtcatcctctctggccaatatgtggatttgttttgtgggtttgatggtaatgttatccatgatgctactatgggacacatatgttcacagtaaattgggttcagtgacctaataaaagaaacaaatattattaagattaggcaatgccatgatttagaaataaacatggccttgtgccatctcccaaaactacctaaaaatagaacaaaatgtgtttgatctccatgtataggcagtaaaaccatagttttgcggccataactatttggaagcttgtttcatggcacaccatgagaaggatgcacacatgtatctgcttgtcctatgttttatgggctcatggcactgattgtaaatgtgaatgtctggtccaccattatcttcatatgtgattgtacttagcatgcctatagaagcctatcttggcatcacttggatggagtttattgaaaatactctcatgtattttgatggtgtgtttggttgagggaggagggtggatgggataggaaaatgcatgatggatgaaatggtctagaatggactgtgatacaagttgtccctccatctcaaaatatagctacctttagcattcaagttctgttaaaacaaaagttctcatcaggtgttagcgctatcttgttcacttttgtcaactgaagtcgcgcccaaaatgtagctacttacacctaccagtcatctcaaccaatcacaaccatctcatttaatttctccacctacttactcatcccaaccaatcacaaccatccccatttaattccacctacttccttaaccaaggtagctagctattttgggacggagggagtagatgtttggttggttacacagtatggtacaaattttctttgcttggttgtgtcggatggttcaggatggtaccatacgatgtttggtttgtaagatgacaagtaggatactgtttgacacgcatgacccacagcatggttcaacattttttttctcacatggaattgtacagaatcaatatagaatattcctggaatatgtatcccaccatccgggaggatattatcccatctgtgaaatcaaacagcatgatcaaccttgaagttgaagatcaaaccatccactctcatcccctcatgcatgcgtgtcagaccatgccatgtcatagccttgccatgccaacgtccctggcgcggcaaggaagcgctgcaatgccgtgctccttggtgtggcataaatggctgctagtgcttgcatgcgtgtcagaccatgtcgtaggtagctgcatgctttgcctgtgttagctagtaggtgcataccattgatcaccactctttgcatattttctagatattcatgtacagtaatatatgaagataattgtcataaaagttactccatcccataaaaattaaatctagtacgggatgttttttatgggacggagagagtacatcatatatatcacttttacacaaatgcatgtatggctaaattacatctataatttcaaacaaaataaacaaatagttatgagtaaccactgatatagcagagcatgtagggaccggactcatactgcatgctttgtttttcctatggcactttcaaaggactcttattattttttcctgtgtttttttattgatgtaggatttaagaaacatactattttaatttttgtgttttttctattcatgtatttttcctatcctacaaatcaaagggcccttcactgagtggcttgcgactttgaaataattcagagtgcaatatgttgtgaccccctcctgtaatataatgacatcacttcaaaaatacttttaaacgatcaatcaacattatttgttagctagctggcaactcaagctaattaattaaagtgtcatacatgtatggcacgctagggggccattacctccaataggcatgcaaagcctgctcgcatccaaaccagggcatgatcagcatgcatgcaaatctccgtcatgccgcagggcacggcaattcagagcaaggttgtcacgccaaggatgttggcatggcaaggctatgacgtagcacagtctttcagtgtgtcacgttccatcatgccagggttatttggcaacgccagtattcttggcatggccaaaagattcagatttggaaataaaattttaatagggtctaatattaaattattatatgtaaaaggtttaagaaataaaaacaattctgcgtgttgatcattgttgttaagttgtaaactactaaagtcaagttgatgcatccttctaccaacctgtggaccagtcattactagtcgatgagttgattagtgttttataaaggagatcagggaaaagagggaacacatgagcaaaggaggtgtgaaattcttgctgcttcctctaatctggctctagctctggtggctggctatatatggaagaggaaaataactctcctctttttcccctttcctatgaacttggcctcccaaacaagacccagtttgctctcaagcagtcccaagttgagtcgtgtccctctagttgtgctctatggtcgacttgtcaactagtcacctactgtgtaatagtggtttggatttgctgttgggacggtagacgacactctctctttgtctaaatagtagtgatttgttatgacatgactttttctgcgtgcgttttaaattactgccatgctgtaccatattgttttgcagatcagcatcctatttgtttttaccaaagcattttggtctacagcatatctgaggtggttattgtattttacatgttcaaattcaatcagctgtttctactttgctagtatttttttttatgttagctttacatttttccaacaacatcattatgcatttttgtcaaactagtgcattgctttcatttcctgtaaataatagttacactccttttttttaactcatcattgcccgtaataattcctttcctttttcaaatatgaatgaacctgttatttcttatttcaggcgaataacagaagcttgcatatgggatgatgtttcaagccttcccatgaggaaggcaaagtcacagctcattgtcatccactaggcatcaaccgtccgttgtatatttttgcatggtagctgcagtgccccgtggctgattccctctcacccttgaagcttgatgcttgcttttgtaggaagcttgttttgcgcagcaagcaccgagtttcatacttgacctctgtttttctttttttttcccttcaattgctacgagaactccatatgtacatatatctgtacattacatgacttcaaaatgtgtcccacttctgtctgtaaatgctggttggccatgtcttgaatggtagggtagctcatagatttggagctcttacagaggctagtcctggagaggcattctgtccaggacatatatatgccgtactgatggttttgctagctattcatatattcaactgtcgggctactggtgtcaatgtcaccctggtatctacaagtgcaacctgttgaggtggtcattgtagagatttcatcagc

SEQ ID NO: 908 - DNA, 11155 bp, Oryza sativa
  source 1..11155: mol_type = genomic DNA
gcattttgcggcccgttcgtagaaagaggctataccatatatggtataccatgaaaaaaaatgttataaattacacgtcgtataatcataatatactataacatatctagatttattctatctttgtagttgtttgctccctatgaaatactagcaaaatattaatatttagaaagtagagaatattgttatacatattaacttgaaaaacaatatcacatggtcaatctcaatagtgaagcgttaatctccctagtttcatgttctatctatgtctatgattaccttgttttcttttgttgatttcctttcataagacagtaagagccaattagagaaggaataatccatcaagtttcatgttactttttaattcactgattttgcactcattaatcttcatctgaaagacaggtggtgataatctcgtgacgtctcttgtgcccacttatctcaataggcatatatatgcctgtgctccagacaaatggccacctggctcagtcaagcggacatcccgaggccaaaagagttgtttgagagaaaacattatgacacgggtctgacgagcatcccgaggtcaaaaaaaagccatttgagagaaaacattgtgagcgtgagaggtgcaccaggcacacggtcgttgggtccacaagcacttaacgcgtaggaggagacgtcatggtagatgagtgttgcatatcccgtttgtaaaaagagactataccatagatggtataccacaaatcaaaatgttacgagaattgcacatcttataatcacaatgtactataatatatcgagatatattctttcttttagccgtttgctccatataaatacaagcaaaaaaaactaaataatatttagaagtagaggagattgttactatattttaacttgaacaacaatactccctccatttcgaaatgtttgacaccgttaactttttagcacgtatttgaccgttcgtcttattcaaaaacttttgtgaaatatgtaaaattatatacctacataaaaatatatttaacaatgaatcaaatgataggaaaagaattaataattacttaatttttttaataaaacgaacggtcaaacatgtttaaaaaagtcaacggcgtcaaacatttcgaaacggagggagtatatcacaagatcaataagccttaatctccctagttcgatgttctatatagacagttctatgattcccttcttttctttggttgatttctttctgtatttccgttagacggtagtaagagccacaatgctatggctgcaaccgctcaattcgccgctcatccgcaatcagcgcgcccgcgccgcccactcactcacagccggatgggcccgatcatccggcgcgagagtgggtcccacctgtcagtgagtgccaccaaaagcgggccgatcctttccaaaaatccctcgtgggaccctcggcttgacccgccccggctataaatagccccgcctctctcctctccttgtctcatcaaccctctctctctctctctctctgcctcggcgacctcgcctccgcttactctcccacccagacaaaaccctctttgcctctcatggcgtcacgcggcggcgacggcctcgtcggaggagggcgcgggcccctcggtgggcgggacggtagagggcgcggcccggccggtgggcgaggcggcggaaggggaggcggccacccgcagcagcagcagcagcagcagccgggctacggccgcggcgacgggggcggccgtggtcctgcccctgctgctggtggtgtcgttggtcgaggaactggaggcggcggcggcggcgggcgcggggacggcggacgcggccgtggccgtggcggcggcggcggagatggcgttcgccctgctatggccgcggctccggcggcgtcgactcctggtccggttgctgttgctgctcggagtactcctcctcctactcccgcggtccagatccccgcggtggcgtcgtcgtcgtcagcgcagccagcggcggcggcgcagcctcctccggcagccgcggcggtttctgccctcgcgagggacgttgggaggcagctggctgtcgtggcgggcggcggccgccccgctccccccgcggcgccgccggcgcccatcccggtgtcgagcaagggcgtcgcgccaccgtcgcggccggggttcgggacggtgggggagaggatcgtggtgcgcgcgaaccatttcctcgtccgcgtctccgacaacgacatgatctacctctacgacgtaagcctcccctagctacattaaccctactcgttcttccagttcccctttcatttcgctttcgttgcgattatatctctagtaaatcgctttcatccctcgtagactagtagaataaattcgttgcgatgcgattcacgaatcgatcaagcgattcgtatacttctagcagtattagattacagtgtactggagtactacatctggtggagtattattttttatcttcatcatcttctcattctttttttttttacctttatcttgtatacacgcggtagttttcgggttgccgttttgggcgaaagctccgcagaggggccatgtgccgtgcttgcttcattttcggtatccatcatcaactcagctctcgcggctaaatcgtggctttagacctttagtacttcggtctctcgctgttgctcggttttgttgttatcaccacatctctgtctgaatccttaggtagtagcctcgtgcatctgtgcagagttgatctggttgctgattgaggaaaagggtcttggtccactgtgtggttgcctggttgatgagatcttagtagagttcctgtgtctttcatctttgctatttgtgccctgaagtaggggtttgggtggtgtgcatgtggtggaagaagggggatcttcgggtttagagggatgaccgaggcggcgcagcctcagccgcatgggagaaggagaacggtgatttgatgttggtggcgaggaatctcatcggactagctaggagaggtgagggaaatggtagaggagaggcatgtaggggtatcggtggcaaacttgaggaagacgataatagtggcggcggaatctgacggagaactcgtggggtttgaggaaggtagggtaggggtggcggcgcgcggggatgaggggagggagtgagaggggggatattagggttagaaatgcacgaatcttcgggcaatcttagccatccaaaaaagtgattgacatttagcatataccccctttgtcctaaaataaatcaatatccctcgcatcctgaggagaacaaaagacctaaatacccctcattattgggtgggaacatttaatgtgaaaaaaagacaaaatacccctcgttaatagaaaaattgtattggtgagtgggaatatttagtgagaataaaagatcaaaataccccctcgttaataagaaagttggattagtgggggtggaggtggcggcgtgaggggtacgagggagggagggtgggggtgacggcgcgcggggtataaggggattgagtgagatggaggattagggttagattattatagagcccacacgaatctttgagcaatcttaaccatgggaaaaagtgattgacatttagcatataccccttttgtcctaaaataaaccaatatccctcacatcttgaggaacacttagtgagaacaacagatcaaaatacctctcgtgaatagcaaacttgtattggtgggtaggaacatttaatgagaacaaaagaccaaaatgtccctcatttgtagaaaagttgtattggtgagtgggaacatttagtgacaataaaagaccaaaatgtccctcattaaaaagaaaattggattagtgagtagaaagtgaaagattgaaaggatgaaacttgtcaatttatggactgagaacaggtaagagcaagtacaaatactacgctagctactagctattagaaataccatgctagccttgatgccgagctggaggtgaacaatgtgatgagagagagtaagtgggtcaaaaaggttgtagcttgtactattgttgtagcatgcaacgagcatgagttaaatgcgtttcttagagtgatggccccactctgctctgggacctagccggtcgcacaacccgcctaggcccagagccagccctgacatgtataataggttagctatggttagctcaaatttttccctactccctttttctctcactatgaatttaacacatatcttgaaacatgtgtagatctagcttttgtatgagaacaaacacttgttacttttgtttgtctctcttttaggtaagttttatagttggtttataactcattgttagcgatcctagtcgttcctatcctttttgacgattagactgcatgcatcttttttttttcaggtgagtttgagtcccccaccaaagaccaggcgcatcaacagggtagtgatgtctgagctggccaggttgcaccgtgagtcgcatctcggtggcataagcttcgcgtacgacggaagcaaggccctgtacactgcaggaaaactgccgttcgactccatggacttcaagatcaagctgggcaaagagctcagggaaatgtgagcattgtcactcctaattaatgtttactaacacttgtgtactctagctaggtttcttgtttttctgatatgtgtttagtacattttgtacatctagctaggttacttatttctggaaaatgtcttctacattttatgcactctaactaggccacttatttttggaaaatgtctagtacacatgctagactacttatttgtggataatgtttaactacacattttgagcactctagcttggtacgatacttatttgtggaatgcaccaactaactaatgaaccgtttaatgtttgccttttcaattgaaaattaagcgagtacaaggtgacaattcgacgtgctggccaagcagatctgcaccacctgcacgagttcatcgccggccggcagagggactctcagcagcaaacgatccaagcactggacgttgtactgagggagtcaccttctctgaagtatgatgcctttcgtcataatcacttttttaggaggcaaaaacgttttagaccataagattgatttcttgatatctttgcattttgcagctatgtcatcgtttctcggtcgttctactccactatgttcggccgacaagacattggtgatgggctggaatgctggaaaggatactatcagagcctgcgcccaactcagatgggactctcattgaacataggtgcataatcatctctaaaacctctttattttgggcggataattgatgacacaaataatccaattcagttttatttgggcctctatattgaaattttggcaaaatatgcaccctacacattcatttttgctaggtggtttccttattttctttcttgccaaagtagacaacacttcccattaattttgttcagttgtgttgaacttatatttacacaaagcaagcctatttagtatttgttttgtttgctaggcctttataggcgcacacacgcacattggtttttatggaaaccggcatccccattagtatattgaacacttttacaatgtttcacacacaaccaaaaagaattcataactgtaagacacaaagtaatgtgaacatgcaaaaacatcttacagttcaatttttattttcacaagatttacttatgcagctctttttatgcatggtttattagcattgttactaactcttgaatcttgattgggtcctcgtgctttcagacatatcctctaccccattcttcaaacctatcagcgtggtagaatatgtcaagaattgtctgggcacacctactaatgctaatggccctgaccctaggcggcctctttctgacattgatcgcctgaaggtacaaatttctcaaccaaaatgtgtgacccaataacttatctatagttactgacttctttattctacttaaaatttgttctccaggttaagaaagcactacggggagttcgtgttgaaacaacacaccaggggaagagcagcaagtacaagatcactacgattacatctgagccactgagtcagctgaagtaattgttcctctcttctcccccttgcttatgtgctctataaactataatcatactttctaaactcacaacttgtatcttgccattttctgtttctagcttttctatggatggaactacccagactgttattcagtacttctcgcagcggtacaaatacaggctgcagtacacgtcttggccctgtctgcaatccggcaacccttctaaccctatatatttgccaatggaggtaaattgtgcatttcttttgtgcatgattccagaaacattatactaactgtgcatataacacgtttgtaggtatgcaccattgtagaagggcaaagatactccaagaagctcaatgacaaacaagtgactggcctcctgagagcaacatgccagcctccccagaaaagggagcagaaaatcattgaggtaagtgtccagctcacatatattgacatttgacattaccttcttttgtgaggaattttacggtccttaaaaaggtacctaaattttacactaaaatttttggtaccttgaggtactttgtatctagaggtattaaattttatcctagaaaaatatggtacctctaaactctagtaccttctcaaggacggtaaaattacccatcttttgtagaccaggagagtaattacttttagtgcttatataatgatttttcaagagtcccatgcatctctttctttatgtgagatattatcaataatggtaattttatcatccttgataatgtactaaaaggtacacatttttttactgtaaaatttggtatctcgagatacttttagccatgaggtacctgtgttaccattctagatattgtgtgtatgtttaatcaaatgtgttgcatttactcaaaaaaaaattcaaaacatgtcatttattgtagtacacataaagtggtgcatccctaattaatggacaacccacattcttcttttagaattttgttaagcatgcatccaacattctaatttggtcatgaggaaaaaaaacatcactcctatttatttatcaaacaaagattgggacattttgatgttttaacatacgtgttataactactaacgatctaacacgattatatttatttattgtatagatggttcaacacaacaactacccggctgataaggtggtgagtgattttagaattaatatttccaatcagatggccactatgccagctcgcgtgctgcctgcgcccacggtagctattctacaactcattttggtgttttttttaatctcctgtatttttatacttatgtgaccttttacgttgtttcagctgagataccatgactctggaaaggagaaaacttgtaatcccagagttgggcaatggaatatgatcaataaggtgatacaatgttgaatgcttccctgaacaattttttttacaatataatttctgtgttattactattatttgacattacttgaaataattcatcataccgaccttgtagagattggttgtgctctgctcattgcatgtctttgaaacttgtgatcgcaatatagtggatgtcacacttttcattttggaagaattagtggatgacacatgaaagcttttaatacgaaactattaacatatgcaatactagatttgaatagccttctttctgttgttcacttgcacatttgtttgttttctcccagaaaatggttggtggagctgtggttcaaaagtggacttgcgtgaatttttcacgcatgcatattgatgccgtgcacagactatgcggcgaactagtttatacatgcaatgctattggcatggtgagcttgtgttatgcttatgaatatatttaagtttgaattgttagtcagcacatataacaccgtgtttgtcttcgtaggttttcaatgaaatgccagagatagaggtggggtcagctgctcctaataacatcgaagctgccctgagcaacattcacacaagggctcctcaactccagctgctcattgtgattctcccagatgttaatgggtattatggtatgtacacattcttagttaattaatatgactgcaagctcttccagtatatatttacacagtaaactgtgcaattttgcaggaagaattaagagggtgtgtgagactgaacttgggatagtatcccagtgcctcaagccaggccgcaagctcttgagcttagacaggcagttcctggaaaatgtctcactcaaaatcaatgtcaaggtaagctttgtttgtggccactgcacttaaaatcacttaaaaatctccctctccgttttatatacgaattaggtgttcaatggagagatgtttacactgtcttgatcaggctggaggacgcaactcagttcttcagagacctcttgtacccggtgggcttgaaaacacaacaataatttttggtgccgatgtcacccatcctgcttctggagaggactcatcggcgtcgatcgcagctgttagtttctctcatttcctgacatcaaattgtttacttcatcgttgaatgaattgaactaaacgaaattttagtggataattgaatggaatttattttgatgaaatatttttttaaaaaaattaacattgtgacgcaggtggtggcctccatggactggcctgagatcaccaagtacaaagccctcgtctctgcccagccacctcggcaggagattatacaagatctcttcaccatgactgaagttgcgcagaatgctgatgctccagcacagaaggctgaaggttcgaagaagaatttcatatgcggcggaatgttcaggttagtttttcttttttgtcctgagatcaaattgagaaagtggcaatgacattttggcttgaaacttagatgctcttttcacttttttttttttgcagggagttgcttatgtcattctacagtaagaatgctaaacgtaagcctcaaaggataatattttacaggtatccacttcaaatcatgtctctattgtgtcaaattactagatacctagataaacttggattttataattccttagaataatatgcatccaaatctggacctatttgtaatttggtaatgttttgcacacgcagggatggtgtaagtgatggacaattccttcatgttctgctctatgagatggacgcaatcaagaaggtaatgatctttgattatgtacgtaactacacttttatcatgtaggttgcttcatgacattttcatatatttttttgttcaaaggctattgcatctttggacccagcatacaggcccctggtgacatttgtggttgtccagaagaggcaccacacaaggctcttccctgaggtgcatggaaggcaagatctgacggacagaagtggaaatgttcgtccaggtatataatttgcctatgaaattatgaatcctagctatctgttaccagaaaacacataattagtgtgatgcctgtgattgtgtattacataatattttgtaattgtctttttttctaaattctgtgtgtgtttgtgtgtctgtgtgtgtgtgtgtaagattgtgtgtctgatacactttctggtatatatgcaggaaccgtggttgacactaacatttgccaccctagtgagttcgacttctacctgtgcagccatgccggaatccaggtagatatatatttacacaacaattttattttgctcatcgtggatttctttttttcccatttatctttgtagacgactgaaatatcaatgatgtgaaattgctcttgtctgtccagggaacaagcagaccaacccactaccacgttctccatgacgagaaccgttttagtgccgatcagctgcagatgctcacttacaatttgtgttacacgtaagcctctgaattgtttctcaacttttgcgttgttaatttgtaccatccataaacctgacctgatctttgccttgaaattttccagctacgctcgatgcacccggtctgtctctgttggtaagctttcatcctaatgctctagctgaaataacacatttttcatacttctagagcttgtttttttctatctttttaaattttccatacttgcacagcttattttccatagagctaaatttacctttgtttctttttctatctttaaactaaagataatgcatttttcatacttacacttcttatttttcctcgggtatatttaataaaagggaatgattatacgtacttactttttcttactaaattcttattactaacgctggtgtcataagtgcatctagatttattgtaacttctatctatttaaatcaaacggttgagatgattgttaataaaaaattagtaggttgtgtttagttcacaccaaaattggaaattttgttgaaattggaacaatgtgacggaaaagttagaagtttgtgtgtgtaagaaagttttgatgtgatgaaaaaattgaaagtttaaagaaaaattttggaactaaacacggcctacgtgtagcagtgctctaaataaaattggcacactcgaagtgctggcttattagaaaaataaatatactgaagataacacacatccatcatgtttgtgcagtccctccagcctactacgctcacctggcagcattccgggcgaggtactacgatgagccccccgccatggacggagcttcgtcggtcggcagcggcggcaaccaggcggcggccggcggccagccaccggcggtgcgccgcctcccgcagatcaaggagaacgtcaaggacgtgatgttctactgctgatcgaatcggcgcctagcttgggttttaactacaaacattttgttggtcgctcgtcagtattcattcaggctgttagtgtactgtgctatctctgaaattgtgatggtgtcatttgggacatgttaacctgttgttgaacttgtgatctgtgatgttgatgcagctgctactcgatagttgtatgtttctcgaagtgtatttttttggggttatgtgtgatgtttgaaagacaggtcatgatctaaattatttctgcggattagttgacatgccatgatctaaa

SEQ ID NO: 909 - DNA, 10463 bp, Oryza sativa
  source 1..10463: mol_type = genomic DNA
gcttggacgcatctgcatgttcccatagcctcagctttcaccggaagaacggctgctacagccatcgaccgcctctggctcgatcgctgggtggctctcgcagccaagacgatctgatacgatctctttgcagagcgagagagagaggggcgagcagtgatccagtttttcaaacgtgacacgtatgccgatcgaatcgccgatagacgatcacaccatatagtatcgtttttccagtgtaaagttctactcgatcatgattgatcgagttcctctctcaggagtacagagtagctagcttaatagtatatagattatttatcttacccatgattaaaactacctagccattaattaggagtgaagatattttcaccttgggtacaatacagtgtgagaatgacaggtgggcccaagccgtacgagagataattccaaggcgcatgagagagagactggctacagatgcatgcatgggtcattcgttcctccagaatcttcttctttccgtccggtgtgatcgggttgtgacttgtcttggaggtgtggactcatctcatcactcactgcatgcgtccacgtgctttgccttgcacatgtatattcacatctcaattctcaaatatttctaactgcagtaaaaatcaatgttgcctatacgcttcgtcttgaccatcccttcatgaaggtaattagaacacgacttgattttaaatcaaaccttttctacccatagcgatcaaaatggtccaagatagaggcattacgtggcagcaattcgagactcgatcgctgggaaaatgagaatactaggcaacagtaatttcaatcggtaggttttcaaaaaagtaatttcagtctgatccttccagctggtacgcatgcacttctagctagttttttttatgcattattgatctgtatagtatttaatttgtcaaattttggacaatgtatatcacaaaaaccacaccaaacatatataacttcaatattaattacgagaaaacaaaacggaaggatggtgtcaaatgggatactacactagacgtacggccttttttgccatttgcagtttaactttaaacattatgaattgctacactcgtacacttgactatacatatgtataacttcacgttcatagcttggttctatacaatatcttaacacccaaattaataacaaaacaaactcagattaattagttcaccccgatcgatgaacttaatgacatataattttccttcaaaaaacacaaaaaaaaaccggacataaattcactttctataatgacacataatttgtcttgggtagcaagtttgattaaccggccgcctaattaatcactcttccgtacggacaagcatacagtcaccgcgcggtaagatcaccacccccttctccctcccaccgcgtctagctagggtttctcctcgtcgatcaccctccgcctataaaatccccctccccttccattcccgcaaggccgcaacatcactcacccactccccaccccttcccaaaccctcacctccatctcgttgccttcctccacctctctctctgccatggcctaccgcggcggaggccgaggtggccgcggcggcgagcagcggccgccctactccggccgcggcgacgtccctggccgtggtggcggtggtggtgggggtggagccccgccgtaccgtcccgcctcgggcttcgtgtggccgccgccggggatgacgccgcggccggggcctcctcagccgcagtacccgcggccggggccgccggccgtcgtctacggcgcgccgatgccggcggcgcaccaccagggcgcgtaccagcccgggggcgtgtaccgtgcgccctccccgggggttccggtgatcggtggctacgcgcgcagcacgcccgtcaccatccgggcgcctccgccgtcgcactcgtcggctccggctccgtaccagccggcggcggccgcgccggctccctcgtcgtcctccacggcgccgtccgctacggctctggccaaggagttcgagcagaagctgttcgtgtcggagaccgcgctggcgccacccgcggcggtggcgtcggccgcggccgcgccggctggcgaggcgtcggtggagtcggacaaggatctggcaccggtgtcgaagaaggggctcgcccaccctgcgcggccggggttcggagcggccgggaagaaggtgatgatccgcgcgaaccacttcctcgtcaatgtcgccgacaacaacctcttccactacgatgtgagctcacccctgaccctctttcccttcccttcccacccctagatctacgcatactccatgcatgctgtctactactgtactcctgtacgtgtgatggtcagatctgttaaatttaccttgcatgttgtgtgtatgcatggattttgcttgcttctggatgatttttttttgttgtgtcgatggcaagttcgtttctctgctgccttcgtttgcagttttgcatggagcgagggcttccgatctcatcctagtttgtgggtgtttggtcggagagtcgcgtctcctttctggcataaagtttcttctccgtttatttggccttctccacttcggtgctcgctgctagtttggtgctagagatctggccgatgtcgagagggccgcagcacacgcagctcacccgttcgaagcctttcgttctgtttgtttaatttggtgatatgcatgtacatatgtagtacgcgtctcacgtgctcaacgcaccggcgtacatgcatgtcgttgtttagttgggaacgttttacgtttcgtacaagggtaggttgctcggttcagttttgcttcttgatccttctgtttcgttctttcgattgcaagttcgtttctctgctgctttcgtttaaagtttatcatccagttcgtgggtgttggtcggagcgtcgcgtttcgtttcttgcataaagtttcttctccgattttttgatcccctccgtttgtttggccatttacaccttcggtgctcgctgctagtttggtgctagagatctggccgatgtcgacagaaatctcatggccgcagcacacgcagctcaccaattcgaagcgtttcgttgcgttcgttttcgtgacatgcatctcatctgctaaacgcactggcgtacatgcgcgcgcatcccgttttcttcagaacggttgctgtgtttggggttgctgatttcgtacaagggtagttctgatctctccctcgtgggagctggtcgggtttttccctctgcaagcaaaggttttgcatcgttttgttctactttacaagtttgcttttttttgtgtgagttggaagacgacgaaacctctctgtgccctgcccggtcggttctacctctggttttgactgtttcttttgttgtcttttggagactgccatttttgtgtaagcggatacgttcgcttgctattttcttgcaagggacatgttaaacttgttctccctgtatgcgaagccttcgcgtgaacttttgcatccaaagtggtcagatcgattcttgttttcttgtagcagcggactagtgaccgctgtcctttctctgatcttcttgcagcaactctccagcggccggaagcctgtcgcttgcagaagtagagtggtggatccacgtttaaaaactcatgatacatgtggcttttggtttttgtgttttctgctcttttttttggcaaaatatatgaaaattttatcgttgtcttcaggatgtcgttctcattcatgatcttgtacgcctagctttttttttattcgttcaaaaaacaataacgttttttcaggtggaattcttgcaaactcgtttcatatgttttgttttgctttggggcttttagtagtagttccatttcttattttgtttttgggctttgatgtttggtttctgattcctgagctgtaccgatattcttggccctgttcctatgggctttggtgggctttaaagaactcgtagtatagctattcttcatgttcgacccgtagtacagctattcttcaactctccccatgcttctctccccattcctcgaacgcttcgccggcgattccctccaggctctagcgtccgccatggatgcccgccccatgtaagtgtcgtacccgtagtattgcaagtgtagttctacctctatcgtgacctcaatggagaggatcaatctttaccaccttctttgttgtttgatttctgttggtccctagctgatttagatttcgttactttggggcattctgtttttttgttcggcctgcattcatttccctaatcaatcggctcggataatgtgtgtactactcataacttggtgctgaattactcatttaggtctagacgaaatacacattgagtagtttggtgtattagtgatggttaactgctctgatctaaactacttgttacgtgatgtttactgtagagttcttgttaagttgctctaagatcttcctttttataaaaaaaaaatctgcccctcatgtccaatagaaaggccgttgatcttctttttggattatgttacaggtttcaatcaatcctgagtcaaaatcaagagcaacaaatagggaagtactcaatgagctcatcaagttgcacgggaagacatctcttggtggcaaattgcctgcctatgatggaagaaagagtctctatactgctggttcactcccttttgaatcggaggagtttgtggttaagctaattgatcccgaaaagaaggataaagaaaggtttgtatgatgcaaactagagatttaaattcttatgaattatgtgttttgcagtctcatattattttttctttcttgtcttctgcagggcggagagggagtacaagatcacaattcggattgctggcagaacagacttgtaccacctccagcagtttttgcttggaagacagagggatatgccccaagaaaccattcaagttcttgatgttgtccttagggagtcaccatcttggaagtatgattctttcttgtctttgttttgacttttgcttgattatttactgactagggtacaaataatgcattgataactactttttctgcagttatgtcacagtgtccagatccttcttctctacccagtttggtcaccggggtgacattggtgagggacttgagtgttggagaggttactatcagagcctgcgcccaacacagatgggcctttcgctgaatataggtacttccctgtcagttactgtttatcagttttctctgaatggaagtgatcttttcagatactaactactgttcggtatgcttcattcagatatatctgcaacgtccttttttaagcctgtgacagtgatccaatttgtggaggagttcctgaacatacgtgacacctcaagacctttgtcagaccgggatcgtgtgaaggtaatattcctactgatggaattcataaaatcatgcaatactgatcctaactcatttttcatgatgtttagataaagaaagcattacgtggggttcgcattgaaacaaaccaccaagaggaccaaatcagaagatacaagataacagggattacccccattcctatgagccagctgatgtacttatctttcctctgcttctgctataactctctttttgtttacattctttaagatacagaaaatcaatatagattgttgatggaatatttgaaatgtctttgtttatggatcttgggcatggtaagtacattaattgtttgtggacatgtgatagaaacattttaatccttttcaaaggtttattccttagatatcaatgtatgttcctttgatatccatactgtcaatgctgtgaaatgtccttcaatgttcaacaaaattgatgtgtaaaggttgaagtgcacataattttactgtcctgagaatagtgctttgtcatcttttttaggacctgcattttgttatcatgcttgttcactgttttatagcatgaacataacttgtttttcaccaaactgatgcctggtttgatgttgttagatttcctgttgatgataatgggacaaggaagactgttgttcagtacttctgggataggtacaattacagactgaagtacgcttcttggccctgcctacagtctggcagtgattctcgccctgtatacttacctatggaggtattgattcatcatccatttacctctacctgaattgtgcatgctgtgtgcagtttgttcatgcaaatgtgtttgcaggtgtgcaagattgtagaagggcagaggtactccaagaagcttaatgacaaacaagtgaccaacatccttagagcaacctgtcaacgcccccagcagagggaacagagcattcatgaggtacaataccatgtagatgcagagccaaactttttatgcttttggatttttgctcacatttaatggccttttatttctgcacattttattagaataacatttccgtagaacataaggctatatttttttcttgatgagataatgaagacaatatcatgtatttgtattgacttccatttcatcttctatcagatggttctccacaacaagtatacagaggataggtttgctcaggagttcggtatcaaggtctgcaatgacctagtctctgttccagcccgtgtgctgcctccacccatggtactatgctttattccatttcttttgttcgcattgtttaaactgctgggaatttctaacaaccttaatctttgcgcttttcagttgaagtatcatgattctggaagggagaaaacttgtgcacccagtgttggacagtggaacatgattaacaaggtgatgccttgctttattattacaactcaatttctctctcaggttaattttgtattgcctttgtttgaaagtgaattctaggtacacttgcttaacttctttatgaattgaccattagcattattttttgttggagagtatctgaaattgacaaccttgtactgaaacataattgcagaacctgtaaagatacaaactactgagccaacataatttacttgctgatgtgtttaaaggaagacactaatacttgttaattttttcagaaaatgatcaatggaggaactgtggataactggacatgtctgagtttttcacgaatgcgtcctgaggaggtacaaaggttctgtggtgacctgattcagatgtgcaatgccactggaatggtaactctggcatagttacaatgctattaaagcagtttaataattatatgtgctgcaattaactttgacttgaccctgtagtctttcaatccaagaccagtcgtggatgtccggtcaacaaatcctaacaatatagagaatgctctgagggatgttcacaggagaacatcagaactgctagccagagagggaaagggaggcctgcagcttttaattgtaattctgcctgaagttagtggttcttatggtatgtatattgttggttgggtaacttttccattccctgatttatttattaaatgtcgtatatgcatggtttttacagggaaaattaaaagggtctgtgagactgaccttggcattgtatctcaatgttgtttgccaaggcatgccagcaggccgaacaagcaatatttggaaaatgttgcactcaaaatcaatgtcaaggtctgtaattctgctgggcttgtatttttttccctagaactataccaattctgtggactatatcttgtgtgcttttagtattctcccccagaagtatgacaattctgtgccataaccaggtcggagggcgcaacactgttcttgagcgagcctttatccgcaatggcataccatttgtgtcagaagtcccaacaatcatctttggcgctgatgtcacacaccctccacctggagaggactctgcatcatctattgctgcggttagtaccctcctagctaatggttcttcaattcattacttggtctgtttgatgttgtcctacaatacaagatcatgggctatcctgtgaataacttgatgcaatagatgaactatatttttcttcccaaagtttattgctttgcatatacaaactttactggtatattttctttgtgttcatgtaggttgtggcatctatggattggcctgaaatcaccaaataccgaggtctggtctctgctcaaccacatagacaggagataatagaagatctctttagtgttggtaaagatccagtgaaggttgtaaatggtgggatgatcaggtaaatttgtggtcaatgtggtattgcaattgtatattattgtaggttcaactgggaactgaccatgctcttgtttacagggagttgcttatcgcattccgcaagaagactggcagaaggcctgagaggataatcttctataggtatgtcctggaaattctgttctgttcagtggtgtgtccagttaaatgaaatttgttgagtggtcattctcctctgcagagatggtgtaagtgaaggtcagttcagccatgtgcttcttcatgaaatggatgccatcagaaaggtgagcttcgcatcatgatacatctgtctgtgttatctattctggacaagccaatttcattgttttttctgaatttaatccttttacattgcaaggcttgtgcatctttggaggagggatatctaccacctgtcacatttgtagtagttcagaaaaggcatcacacaaggcttttcccagaggttcatgggaggcgagacatgactgacaagagcggaaacatccttcctggtcagtttcttgttggttgctactgagaacatacatctgctacttcttcaggcatttgatgattggatatatcgttgtattccgtttctttttggtcctgcaggaactgtcgtggaccgtcagatttgccatcctacagagttcgatttctacctgtgtagccatgctggcatacaggtaaaacccatgctggaagctgtttgcagattgcacaaaattttccagccaacaaaattttcagttaatgtgtgctcttgacattccttttctcagggtactagcaggccaactcattaccatgtcctttacgatgagaaccattttacagccgatgcacttcagtccctgaccaacaatctttgctatacgtaagttcatttctctgtttctgcttagttgcttagctcccttattatttcggctgccccaactctgataattcctactgttggcaaaatgcagctatgcgcgatgcacccgggcagtgtctgtgggtgagtcttcttttcttgcatctttgtttctcatttctgcattagtttgcttagctttgtttacctccttcgatgagcaagcaaatgtgtacaccaaaatttttggcattggtttaactgtgaactggaaaagataagcgctaggagtaggctgttgttctcaacagtagaaatccttatttagcttgtgttaaaaattggacctttgtttactgtaatgcacccaattcatcatgtggtaagggaactgcacagctgtcattgcttgttatgcaccaccaatgtcatcttgttaactgttccacaacatctgcttttcaaaattgtcctcagcattttcttttcgaatgtgttccatttgtatcttatcattttgtatgtgatgctcccatgttactttctggaactagcaattgaactaccgaaacattttcctttctattcactgatgtagtactcattttcctatctgtgcaatttagcatgttttgaaattgtgtttttgccaggtcggcgaaggagccgaccaaatttcattaagattgaaattgtgtctgtctactgtatgtaatgcacatcatgtgatcttgctttttgaagtgaatcgaacctagtgttatttgcttgtcaagcaccatcaatgtcatcatgttaactgttcctaaacatgtggttttcaaatctgctgaatcctatcatttcgcatgcgatgctctcatgctactttctaggcactagcaattgaactacagagattcttttctacgtggtgctccttttcaaatctgttgcatttgttcactgatgtattgctctttttctttcctgtgcagtcccaccggcctactatgctcatcttgctgcattccgcgctcgctactacgtggaaggagagagttcggatggtggctcgacccctggcagcagcgggcaggctgtggcgcgagagggccctgtggaggtgcgccagcttcccaagatcaaggagaacgtcaaggacgtcatgttctactgctgaggagattgttggcaaggagagcccaatattctggtagttttttggttggtagacttgtttgtgtccttggtttggagctggttgcttgtagttccatttgctgtttccgagtagccggattgtgactgagcttttgtggtctttaaggccttaactctgcttgagacaatgcaagtcttttaaatttccctgtggcttttgtta

SEQ ID NO: 910 - DNA, 7918 bp, Oryza sativa
  source 1..7918: mol_type = genomic DNA
aagcgccgtgttgcctctgaccgcgccacgcgaatgctccgctttgtccctcgacgccacgccacgcgagtagcgccacgcaccgcccaccaccccatccatccatccatcgggccgtgcgccgtggttggcggcgttttttcttggtaggttttgtattgtacgcacgcactggtagtggacggctagtagcctagaactggtgtaagtcgttaacccgtaaaacctacttaacctgtttggattcgtggccgaccaattacacccctacctaaaactaagatcggtgctgctgctgcttttgcccgtgcgcgcacgagtaaaaaatgggtttgggccatgagggaacgagggggtgtgtgtgttgtgttcttctattctgcaatggtggagcgccttcttgtcgggggcacgcacgcttccaaagttgtaccgcacgggcaccgaggggcagggcagggcaggttctctcggctttgggacatttcttgctgcgtcgctggtggtgtagcagtggtggtagtgggagtagtggcgttcaaggccaaaggatgttgcgtttcgatttctctagtgcttgggccatgctgcatgaggcttaaactaaactttgatcacactttggatgcatgttcctgcacaacaccaaaaataaaaaaaaaataaaaatcctccaaaaatagcgcttggtaggatgtccgtcatgccagcaatacgcagttgaatcagacttaagtgcctgtcagcattgaacaaagttttgtaatgtcaaaagttccattattatacacacaatctgcctctcaatgatatttacaagtactactagtactagtactcccatggtaacataacaccacgcgctagcggccagccacacgaacatgtgatacacttctcaataaaaatccccatccattctcccttccttccatccccttcgataatccacccccatccgttggaaacctcagctgcactaccctctcgtgtttctcgcgccccaattaatccacgggccacaacgttttacctaccgtctccccccacctacaagaaatcatttctacgacgcctgctacctttggtaaaaaaaacggagcatattttgcttcttccctgttcaatcttaccaccggcaggcaaggcgaggtctatttatttatttaccgcgcgaggcggccactactactactaggaccaaacagggtcaaagcagctgcagtagttgcatcagtgacgaagggttctaatgcctttctgtcccgcctcgcattaattctttggcttggttggatgcgagagaaaaaagaggagagattttggtagaattgtaagatttttgttactactaccactcgttttcttggcttggtttggtttggtgtttgatcacgcggtggtgacattataagggcgcggttgcgcaggtgttcgaccagcgggtggcgaggtcggcggcgaggtggtggtggtgcgcacatgctcgaggtgctggacatggcgccgccccggcaccagccggcagctgggaaggcgggcggcgggcgcgggcatgggcatgggcatgggcatggtggtggtggtggtgggccggcggcgaggaagcagccgttgcagagtagcatggcgcagcccaaggcggagacggcggcggcgacggcggcggtcgcgccgccggagggagggaagaagtgcggcggcggtggcgggaggcggcgcggcgggcgcgggcgcggcggcagggcgggtgcggggccggggccggggctggcggcggcgccggccgtggtggtggcgcccgcggcgcgcgccgtcattgggccgccggtggcgagcaaggggctgtcgttctgccggcggccggggttcgggacggtgggcgcccggtgcgtcgtgaaggcgaaccacttcctcgccgagctccccgacaaggatctcacccagtacgacgtaagtctctctctctctctctgctccatatgtactttgagcatggaagaaaggtgagagcggttttcttggtttccgtggcgcggcggcggcggactttgcaggtgaagatcacgccggaggtgagctcccggagcgtgaaccgggcaatcatgtcggagctggtccgcctctaccacgactccgatctcggaggtcgcctcccggcctacgacggccgcaagaacctctataccgccgggacgctcccgttcgacgcgcgcgagttcgtcgtccgcctcaccgacgacgacgacggcaccggcgtcccgccacggtgcgcgcattatttgcccacagcccggcgctccattcttctccggccatgtcttaaccgtcatcgcgtctctggctccgcagggagagggagtacagggtcgccatcaagttcgccgcgcgcgccgacctccaccacctccggcagttcatcgccgggcgccaggccgacgcgccgcaggaggctctccaggtgctcgacatcgtgctccgtgagcttgccaaccgcaggtacgcacacgcattgctcgtcgtcttgtgttcttgcaagggaaaagaaaggaaaaaaactaatactgattggccccaatggtaggtatgtctcgatagggcggtcgttctactcgccggacataaggaagccgcagcggctcggcgatggcctacagtcatggtgtgggttctaccagagcatccggccgactcagatggggttgtcgcttaacattggtgagatgctcgcgaatatttggtgccctcatgcatgtatctttcctggttgtcatgtgcttgctgcttacatggtggatgatgttgatgccagatatgtcatctaccgcgttcatcgagccgctaccagtgatcgaattcgtggcccaaatactagggaaggatgtcatatcgaggccattgtcggatgcaaacagaatcaaggtaaatttatgcttgcggggaaggaatagtctagccttgttactgtagtgggatgtaagatgtgttgtttggatgcttttggttaactgatagatggcttaattgtgatgctttgcatgattatctgatttacctgtggaattcgccaattccatgcagatcaagaaagccttgcggggcgtgaaagttgaagtcactcaccggggaaatgtgaggcggaagtatcgcatttcagggctgacaacacaaccaactcatgaactgatgtatgttatagtgtaattcatttctcgtcatgtactttcaattgtcaaatgtcttgtaccgaactttcacgaaagtagaagcatgcatgttaagcactccctcttgcttctaaatctgagtatggcagaccaaatagaccaaattaactatcaatatccatatttcatatacgttagctactaggcattgtgttaagctatggaactgattttgtttgttttaacagtttcccaatcgatgaccaaatgaacatgaaatctgtcgtagagtatttcaaggaaatgtatggcttcaccattcagcatccccatcttccctgccttcaggtgggaaaccaaaagaaggcaaactatctaccaatggaggttggtattaatctcatcaagtcacaaatttcattagctggtcaattatgtaacattcaaccttggtaaaagacatcatcattttgagatatttcttaccaggcctgtaagattgttgagggtcagagatatacaaagaggttgaatgaaaagcagatcacatcattactcaaggttacttgccgtaggcctagagaacaggagatggatattctacaggtctagttttttctcctaatcggattataacattttgaaatatatggattacatgtttgtcaggagtaaatgtttcaagtattttgtcttactaaattggatgataaatccaaacaccaaatcagtgcattagaatttagaagatacgcatgctaatgtacgttaattgttctatgctgaagtctttgttttcattacccacttccaagtggtccaagcattccatgcaattgatgttcaatagctacccacccaataagtgctactagggtttctcttcacttgatcagcactcttgttataatggttcaagactaaaaaaatttctttccagacagttcaacaaaatggatatgagcaagacccttatgcaaaagaatttggaatcaacattagtgagaagctaacctcagttgaagctcgggtccttcctgcaccttgggtatgatttgcctttgttaatctcagtagttggctaactgctctcagctaataatttgggtatgaaattttgtggctttcagctgaaatatcatgatactgggaaggaaaaggagtgcttgccacaagttggtcagtggaacatggtgaacaaggttagattccccgttttccgcagctgtatacaacagacgtccttttatatatcatgatgatggcctgatcctgctagttttccactaattaagcattttttttttgcagaaagtgataaatgggtgcaaggtgaatcattgggcttgtataaatttctcaaggagtgtgcaagaaactactgctcggggattctgccaggagttggcacaaatgtgtcagatatccggcatggtatataactcttaacttcatctaatggttttgcataatattggtgcttttataatgttatttgttggctgcatcttttcagttttatctctgctcttcttgcaggaattcaacagtgagcctgtgataccaatatactcagctagaccagatcaagtagagaaggcgcttaagcatgtgtataatatgtcattaaacaagctcaagggaaaagagcttgagcttcttttggccatcctccctgacaacaatggttctttatatggtgagtgtcggtttggtaattgcatcgcaatttttccttggaatcctcatattgtgtgaaatgcttaagatgtaacttaatatttgcaggtgatataaaacgtatatgtgaaactgacttggggttgatatcacaatgttgcttaaccaaacatgttttcaagatcagcaagcagtacctggcaaatgtctcacttaaaatcaatgttaaggtaccaaatacttataaaccaagcagttaatacttagcttgtctacacaaatgtagtgtaatgcagtaagcagacttgcagcattgctaatgccttgcatttcggagttgtgatacagatgggaggaagaaacaccgtgctgctggatgcaataagttggaggattcctttggtcagtgacataccaactattatatttggtgcagatgtcacgcatcctgaaaccggggaggactctagcccatccattgctgctgtaaggctgagcatttctatggttacatggccatcattttttttttaacctcttaccctctctaataagctgcatgcaggttgttgcatctcaagactggccagaagttacaaagtatgctggattggtgtgtgctcaggctcatcggcaagagctcattcaagatctttacaagacatggcatgatcctcaaagaggcaccgtaacaggaggcatgatcaggtcttttttgaggaacaatttgttcttccaaccaaaattaattgatgaagcctcctattaaatagtttagggttacctcctaccgattaacttatttttggttctggtcttgttgtgtagggagctcttaatatccttcaggaaggccactgggcaaaagccattgagaataattttctacaggtatgctactgcaaatactgtttataaactaacgtttgtagagtacagtagttagatatttgtggaatcaatttaatcctatgtatcttcaacaagtactgaacctagtgtttttgttcgctatttgaagtatgaaagttgctgttataggcttctatttgtatatctgctaatagtatcggtactgcttctcttctagggatggtgtcagtgaaggccaattctaccaagttctcctctatgagttggatgctatccgcaaggttagatgcatttgtattttctttactcagatattttgtccactttattaggttgcctgacgaaatgttttcttttaggcatgtgcatctctagaaccaaattatcagcctcctgtaacattcgtggttgtccaaaagcgtcaccatacaagactcttcgcaaacaatcacaaagacagaagtagcacggacaaaagtggaaacattttgcctggtaattactattcatcacctcttaaggcatttcattggatctactgcagatgataatgcaaccaacatattgcaaaaatattttttttattttaactaaaaccctcagtttgttggtagaactgtttcagtgatttgatacttgttttcctattcatgatatcacattcacaactgtttttcttggattattaaggtatcactttgggtgaactaacttttatatttactgttattcacttgatttctgtaattgctcatgtgtttgctaaaaaacaggaactgttgttgattcaaagatctgccacccatcagagtttgatttctacctctgtagccatgctggaattcaggtaagaatattgtagtggtccttttgtaaggctgacatatactgaacttgtcgttactctggtccccatgtcttctgtgattaagtatttgaggagacttcatattgtcttttcaaccacaagcagtgtagtacttcctccgtcccaaaatgtaagcatttttgaggttggtacgggtattaagaaagtaggtgagaatgattgaagaaggtgtgtgattgattgaaaagagaaagtaggtgaaaaagaatgattgtgattggttgagaggagaaggtaggtagaaaaatagcttcattttgagacaaattactgtgctagaaatagctacattttgagacagaggtagtagtatcacagtagctagttactgtagtacctagcaaagggcacatctgcacatgctagaacaaacaaacttactataccatggtcaaatttttaatcatgtgattgtacattatagtacttggatcagcaaatattctgtctgtagtagcgctggaatataattccccaagtttgtcctccatgtactgaaatgactgatgtgtgtgagttttccagggaacaagtaggccagctcactaccacgtcctttgggatgagaacaatttcactgcagacgaaatgcagacattgacaaacaacctttgctacacgtacggcattactgaatcttgttaagtttatcctttgcactctgagcttctctctatagaaattgtctgacttggtacatttgctgatgcagttatgcacggtgcacacgctctgtttctgttggtacgttcttctgaaatgatctgaacatttttccatcattttctttgtattcatgtgttattattagttggacacgaattctgaaggtgaatcttgcatttcttttttcctggtccaacagttccacctgcatactatgcgcatctggctgcgtttcgagcgcggttctacatggagccagagatgtcggagaaccagacgacgtcgaagagctccactgggacgaacggaacctcggtgaagccattgcctgcggtgaaggagaaggtgaagagggtgatgttctactgttgatgactgggagactacctttaactactcacatatgatgtacctaacattgtagaattttagtggtagggatttagaattagcttccttcaggaaagggagcagagcaagcatttggatcctgagcgacctcttttgaccactctgtaaagtactaagtaacgcatgtataatagttgttgtatcagtctgaaaaaaaggaagtgcactcagtgcttgtttttccagttctaggatgattttctcttcatggttaagatctggtaagagactc

SEQ ID NO: 911 - DNA, 7397 bp, Oryza sativa
  source 1..7397: mol_type = genomic DNA
gtcctcgaatccctctgctcactaccgtcgcgctcgcttatattgcgggagtcggcgacgaaaaccaccgagcacccgtcggcgcagcagcggcggagcgaagggaagggaagggaagccgcgatccagccgccgtcgactcgccgcccacgcagtcgccgccgagccccatctccgccactgctcggtgcgtgcgatcgttcgctttactagctgtactagcgctctagagtgctgtgctttccccagtttggcgtcggtgctcggcgaacctgtgtgttcgatcggatgcgtattatgtgcgggcgatttagtgttgatgtgtcgggtttttttttatactcttgggtttttcggtggtgttcgttggtggggggaatatgaagggttttgagggaggttttagtggaggatgtgaatttgagatcgattcggttgttgtcatgctcttttacactttttggtggttggggggtggaattggcaagcgtggagaagggcaggtggtggagaagatgaggaagtctggtaatgtacgttcatgatgtgtttttgtggaaattgtgctcgtctaatttgatcgatccttttagtttttttctccatgcttctgtcactgcattgcatgataatttggcttttgaaaggggggaaaaaggaatgctctaattttggggaatcaagaacatgtggtaaatatgtatagtccagagtatagaaatggatagatgatagggatacccagggcggagccaggattttgagccactgggtcatggcttttacttgtactaatgtcgtgtttaaaactctaattgttctcgaagctagatatctttagatcaaaattattttggagctagagcaatgaggaagttgggatcgtttcattttgttaaaaataaatgtttaaactctatattttataattattttataagaatgcaggaggttttttaaggtccaaaaatttaaaagttaagactataaaaccaggcataacaaccatgcgttttttcagacataaaagtttgttctgaaagttgtttattacttcctctatctcaaaatacaactacctactctcttttttaaaagattaatgttagggtgtgaaatagttatgattggttgaaaaaagaaagtaggtgaaaaaattgaattgggaaaattgtgattggttgagatggaacggtacatagaaaattagttgtattttaagataattttgaacattaaatgtaacatattttgagacggagttagtagcttaaaaaacacagctaacatctagtagttgattagcaaaactacaggcctaatgcattgatatacacaacacatagctaaaacaaagagttggttaatggatgaaataggtctaattgccgcattagtagtgggttgacagtagcataacctagctaacaaattgtgcttccaaagaagaagctgtactatttcagctttcatgagctccagtagtttagcgacctgatcggggtcatgaagcttttgctgctggggtcattagctgcaaaatcctgcacgattcacttgatcgattgaataccatcggggtcacctgaccctgacgatattactgcagctccgcccttggggatacctgatttacaaaaaggaatctggcatgtgcaatagttagtatcagggaatagtttacaaaggaagcatggagatggttcgcatgatcattgttttgcttgtattctttgatacattacagtaccttgtttacttcactactttaagattatgatagaaacaggataaaatttagcttttaagttctttctgtagacgatacttaccattctgccgtaaatctaaagagctgtgcgtaattcttaacaataattgtttatattgatgagttcctgcagttgtgatatgcgccatgggtgtcaagactttacaggtatcagggtttgctctagatgacagtgctgattacgtcaaggatttgttggagcgaattgttggctgtgggaatgtgtatgcagtaaagctcaggcatccaaagaacgtcactgctacctcaagagcatatgctatagttcagtttcagaccgaggaacatgcttcacttgtaaaaaatgcggctcaaagaaagatactccgccgtgggcattattatctgaaagtccatccttcagatcgtgacattgttccaagaccaagagtttcaatgttcaagctagaggatgtaacactgcattttggttgcctgcttaaggaaacaattttatctgctctgtggagtcgaaaaggagtttctgttgagtttggtttcaatctgaaaaagatttacttttacctgcagctacccaacagctcaatcgaatataaacttgaactttcccatgagagcatatgggagatccagcttcaacgcccacccaagtcacaaacgaagtttcttttgatccaggtatcttgagctctacagcacttgctgatttcttttcagtaaattgtacaattattgtatgaccacatgttcacattgactaatcttgctgttgagatagtttctttagtaaatattaaagtggttcgcctgtactgtgttttgttctgctattaaggcttgacgaagaacggtttagtcacaacagttcatggtgatgacttttggaattttggtcaatggtgattttgctgttttcggaaggtgaaagttacatgggagttctgttagaatgtatgtatcatatggtccttatttgatatacaaatggacaatgttaatgtgtttaggagcttactgtgatggtttaaaagaatcatttgaatttcttctgttagtattcttgttcccctacctgctttgctgtggctcacaacctgcactttagcatggttgaacgacattatactgttcaatcataaattactggataatgaaattgcatttctaatctttgtgtttctttaattcttcatgctaatgaatttatgagtgctctctaactcgcctgtccctttcatttcaaaatatgcggcaatgaagttgtataaagatatgctacttgagtattacttatctggagtgaaaatatgatcgtgttcttatgtaaaaaaaaatatgatcatgctgaagcactgaattcttttatccagtattttcctttatatttccacttcaaaatgttgatccaccccagtcaccaattctagttgttatctcttgatttaaagtttagataaccttaaatttataaatcgtttcatgtttcaggttcaagctgcacctaagatttatgaacagacaccacgccgttctggtgttatgtacgaagatccattattcaactattttagggatcatacagatgatcaatggaccaggacaacggattttacttcatcttctagcattgggcaatcatatattttatgtcttgaggtaccacgtcgatgtgatctcccaaacattcgtgactacttcttttactatcatgagtacaatcatgacttcgagtgccggagtggggggtatccatattcaagtgatactcgctttgttccgattgtgaaatctcgtggttatgtcccctatgagatactcttcaagatcaaccatttggttcagaatgggacacttagcggaccgacagttgatgacagcttctttcgtctggtcagcccagcttttgtacctattgaccatataaagcgtgcacttgaaatgatgtcatatttgaaaaagacctgcttgaatccaacaagttggctatctgaacaatactcaaaattccggagatcacgctacgtccaaccatcacctaacatatctctggatgatggattggtttatgtctacagtgtatttttatggacctgagattaatgtctccaatcgtgtggtgcggaatttttcttctgacatagagaatttccttcgcatttcatttgttgacgaggactgcgagaagctccgtgcaactgatttatccccccgttctgcttcaggacatgatgcaaacagaactgctctgtataagagagttctgtcagtcctttcagatggcatcactattggtggcaagaactttgagtttcttgctttttcttcaagccagctccgagataactctgcatggatgtttgcttctcgccagggattagctgctagcgacattaggacatggatgggggatttccgtaacatcagaaatgtagcaaaatatgctgcaagacttggtcagtcttttagttcctcaaccgaaacattaaaggttcagaagtatgaggtggaagaaatctcagatataaaaaatggtacacagcatgtgttctctgatgggattggaaagatatcatctgcttttgctaatgaagtggccatgaagtgcaacctgaaacgctttgctccttctgcttttcaaataaggtatggtggttataaaggtgttgttgctgttgaccctacatcacgctggaagctttccttaagaaaaagcatgctaaagtttcagtcagacaatatcacagtagatgtccttgcatacagcaagtaccagccaggcttccttaatcggcagctaattactcttctttcgacacttggagttagagatagtgtctttgaacagaagcaagaagaagcagtgaatcagttgaacaaaatggttactgatcctcaagctgctatcgaagcaattgaacttatgcccatgggagaaataacaaatgcagttaaagagctgttgttgtgtggctaccagcctgatgatgaaccatatctttctatgctgctacaaacttttagggcatccaaattactagagctgaaaaccaagtcaaggatattaatcccaaaaggacgagcaatgatgggatgcttggatgaaacacgtacgctgaagtatgggcaagtgttcattcgagctacttcgggtgtaaatgacaatgacaggttcaccgtgacaggaaaagttgtgattgccaaaaacccttgcctccacccaggtgatatacggattctccatgctgttgatgttcctgttttgcaccacatgtttaactgtgtcgtctttccacagcaaggaccaaggcaagtattacatactcctatgttttctagtagtatgcttttttctgcaaaaccccacttttctggaaacaaattctgtctgggtttcacattttaatgaaaccacatattcattggagaaaagcttattctccaatttcatatattttaggttgaagaacttcgttgtttgtgaagcttagccacctgcgatttcatggatatgcgatatttgatcctttttttttcttgttaaattcccatgcatgcatgttcttgtctgttcgattttgttatctacatttggttttaaatatatgccaccattgactttgttaagtaaagtgcaaagagtaccactagatttgtcatatttgtctgttgtacaaatatttatagagaagacaaatagtcaaatgaaataaaaagtcaatggtgccatatttaaaacatgaggcagtaattattttgaacatgattgtttgtgcaggccgcatcctaatgagtgttcagggagtgatcttgacggggacatatattttgtttcttgggacccatctctcattccgcctcgtatggtgacacctatggactatactccagcaccaacagaaacattagaccatgatgttacaattgaggtaagctcagttttcaaccagaattgtccactctttcttgccactcatgctagcaattttattcaattgttggctggctagtgttatgctgttctttggactcacgagtccagctcttgtattttttaagattatcatttactcctattttctggcactgcaagatttgggtatatttatttgcaggaggaaacaaactaatcctagtgcacagcatatatggtttttattcaaaatccttcatttaataatattacacatctatttccctattttctgtaataaatcttgaatattagaaggaagatatgctgcctctttcttgttagaatatttaacttctagagatacgtttgtaattggtgcctcataatgaggatactactgtcaactgagagaatttgtcttaagctagttgttttttttgtttccctggttatcttgtgtaaacacgtactgtgctcacttataagagtagcaaattctgtgttctttttttttttgaaaaaaaaatgtatttggaaaccatgcagtctgattcaagtctaggggtagtctgcatttggttggacagttgctgttcaaattgataatactattatgttgcctgttggaataaaattattaccagcttcatgtttctgaatttgtctacatagcagtcacttgtttttcttgcaataaaacagcacggaaatcacataattaagaaaataaatgtcataaatttatctttgttagaactgagttttagcaaatcttatacactgccctgtaacttcattattgcaccatgcaggaagtagaagagtacttcacaaattacatagtcaatgagagtttaggaatgattgccaatgcacatgtagtatttgcggataaggaagacctcaaggcagagagttcaccatgcattgagctggccaagctcttctccattgctgttgactttcccaaaactggagtgccagccctgattcctcctgaactacatgtgaaggagtatcctgatttcatggagaagcttgacaaagtcacctatgaatcaaaaggagtaatcgggaagctctacagggaaataaagaagcacacccctcacataaagcacttcacaagggaggtggcaaggcggtcttatgacaccgatatgattgttgatggctatgaagattacatcactgaagctatggcattgaaggacgagtacgacttcaaattgggtaatcttatggatcactatggaataaaaagtgaggccgagataataagtggatgcattcttaagatggcaaagaatttcacaaagaaaagcgatgctgatgctatcagattggcggtgagatctttgcgtaaggaagcaaggtcaaggttcagtgagatgagcttagatgataatgggcatggccatgatgcctccgaagccaaggcatccgcctggtaccatgtcacttaccaccctgaattctggggttgctacaatgaaggatatgagcgaccacactttatcagctttccatggtgtatctatgagaagcttttgcgcattaagcaaaggaggaagttcgtcaggaagatgcagcccgagttgttctctctccacaacttgagaatttgagtgtggccagcatgtttgctcttatacatatatctgaacttttgcattgaacatgtctattctggtgcttgaatgcttactg

SEQ ID NO: 912 - protein, 911 aa, Oryza sativa
MDAHDGEADELPPPPPVPANVVPIKADDVESEVPANKPAKPKRFPMARPGLGRKGQPIQLLANHYKVSVKSSEEYFFHYNVILKYEDDRPVDGKGVGRKVIDKLQQTYRSELSSKDFAYDGEKSLFTIGALPQVTNEFTVVLEDVSTGKTAANGSPGGNDSPGGSDRKRVRRPYQTKTFKVELCFAAKIPMNAIAQAIKGQESENSQEALRVLDIILRQHSAKQGCLLVRQSFFHNNPNNFVDLGGGVMGCRGFHSSFRGTQSGLSLNIDVSTTMIVKPGPVIDFLLANQKVDHPDRIDWQKAKRALKNLRIRTTPVNSEFKIIGLSDRNCNEQMFSLRQRNGNNGDVDEVEVTVYDYFVKNKGIELRYSGNLPCINVGKPKRPTYFPIELCSLIPLQRYTKALSTLQRSSLVEKSRQKPQERMSVLNDALRHSNYDSDPMLRASGISIAQNFTQVEGRVLQPPKLKAGNGEDIFPRNGRWNFNNKKLIQTCSVDKWAVVNFSARCDVRNLIRDLIRNASAKGIQMAEPFDVFEESPSLRRAPVSRRVDDMFEQIKSKLPGAPKFLLCLLPERKNCEVYGPWKRKCLAEFGIVTQCLAPQRVNDQYLLNLLLKINAKLGGINSLLQIEASPSIPLVSKTPTIILGMDVSHGQPGQSDRPSIAAVVSSRQWPLISKYRASVHTQSPKLEMMSSLFKPRGTEDDGLIRESLIDFYTSSGKRKPDHVIVFRDGVSESQFTQVINIELDQIIEACKFLDEKWSPKFTVIVAQKNHHTKFFQSGSPDNVPPGTVVDKQVCHPRNYDFYMCAHAGMIGTTRPTHYHVLHDEIGFSPDDLQELVHSLSYVYQRSTTAISVVAPICYAHLAAAQVGTFLKFEDMSDASSSQGGHTSVGSVPVPELPRLHEKVRSSMFFC

SEQ ID NO: 913 - protein, 911 aa, Oryza sativa; identical to SEQ ID NO: 912

SEQ ID NO: 914 - protein, 904 aa, Oryza sativa
MESNSGEIEELPPPPPLPPNAEPIKTDDTKKLSKPKRALMARSGCGKKGQPIQLLTNHFKVSLKAADEFFHHYYVNLKYEDDRPVDGKGIGRKVLDKLQQTYASELANKDFAYDGEKSLFTIGALPQVNNEFTVVLEDFNTGKSSANGGSPGNDSPGNDRKRVRRPYQTKTFKVELNFAAKIPMSAIAQALRGQESENTQEAIRVIDIILRQHSAKQGCLLVRQSFFHNNPSNFVDLGGGVMGCRGFHSSFRATQSGLSLNIDVSTTMIVKPGPVVDFLLANQKVDHPNKIDWAKAKRALKNLRIKTSPANTEYKIVGLSERNCYEQMFTLKQRNGDGEPEGVEVSVYEYFVKNRGIELRYSGDFPCINVGKPKRPTYFPIELCSLVPLQRYTKALSTLQRSSLVEKSRQKPEERMSVLSDVLKRSNYDSEPMLNSCGISIARGFTQVAGRVLQAPKLKAGNGEDLFARNGRWNFNNKRLIKASSIEKWAVVNFSARCNIRDLVRDIIKCGGMKGIKVEDPFDVIEEDPSMRRAPAARRVDGMIDKMQKKLPGQPKFLLCVLAERKNSDIYGPWKRKCLAEFGIITQCVAPTRVNDQYITNVLLKINAKLGGLNSLLQIETSPSIPLVSKVPTIILGMDVSHGSPGQSDIPSIAAVVSSREWPLVSKYRASVRSQSPKLEMIDGLFKPQGAQEDDGLIRELLVDFYTSTGKRKPDQVIIFRDGVSESQFTQVLNIELDQIIEACKFLDENWSPKFTLIVAQKNHHTKFFVPGSQNNVPPGTVVDNAVCHPRNNDFYMCAHAGMIGTTRPTHYHILHDEIGFSADDLQELVHSLSYVYQRSTTAISVVAPICYAHLAAAQVSQFIKFDEMSETSSSHGGHTSAGSAPVPELPRLHNKVRSSMFFC

SEQ ID NO: 915 - protein, 904 aa, Oryza sativa; identical to SEQ ID NO: 914

SEQ ID NO: 916 - protein, 904 aa, Oryza sativa; identical to SEQ ID NO: 914

SEQ ID NO: 917 - protein, 904 aa, Oryza sativa; identical to SEQ ID NO: 914

SEQ ID NO: 918 - protein, 363 aa, Oryza sativa
MFEKVKANLPGPPEFLLCVLPERKNCDLYGPWKKKNLHEMGIITQCIVPSVKMNDQYYTNVLLKINAKLGGMNSKLSLEHRHMIPIVNQTPTLILGMDVSHGSPGRADVPSIAAVVGSRCWPLISRYRASVRTQSPKVEMIDSLFKPLDDGKDDGIIRELLLDFYKTSQQRKPKQIIIFRDGVSESQFSQVLNVELNQIIKAYQYMDQGPIPKFTVIIAQKNHHTKLFQENTPDNVPPGTVVDSGIVHPRQYDFYMYAHAGPIGTSRPTHYHVLLDEIGFLPDDVQKLVLSLSYVYQRSTTAISVVAPICYAHLAAAQMGQFMKFEEFAETSSGSGGVPSSSGAVVPELPRLHADVCSSMFFC

SEQ ID NO: 919 - protein, 1787 aa, Oryza sativa
MVPEPAPAAATEPRRSTRRRLMTAAAMEAEAEAVADLDEIDREMSRAESRKRQRRTAKEKPGARKGATEWKPEDVEKAAAAEGVAELDEIDREMPRPELRKRQRRTAKEKPSAHEGATEWKPEDVEKAAAQEPEGTELDSGLSPAESRGKRQRGVEKVKRRTRKKTAKEKTKETTEKSAAQAPEKMKVNDAGGALAEDVCADEPDAEQMAMEEEEEAADVLEAEERMGKCVGEGSAEKAATRKRVARPSTARRVEDSDDHFVGDPVPDDEARQRWPVRYSRKGSDSLLKQEPDEDEEMKARCHYLAANVDDEIYHLDDDVYVKAGPDEENYIGRITEFFEGVDRGSYFSCQWFFRTADTVISSKLLKVHDHRHNHKRVFLSKEKNDNLIECIVSKVKIAHVDPNMTPQARAHAISDCDLYYDMSYSVAYSTFANLPADNDGALGSEATSNISCDDADNSSKGKLSADIVAPYSEQTETASLLDLYSGCGAMSTGLCLGFAFSGINLETRWAVDINKYACACLKHNHPYSQVRNEKTEDFLALIQQWDALCRKYVVHKNDTLEPSIDMPLNDADDVNEPLPEDIFDVEELLEICYGDPSNTGKNGLWFKVRWKGYDPSYDTWEPIDGLSDCPERIKEFVEKGHKENILPLPGAVDVICGGPPCQGISGFNRFRKHNDPLEDEKNKQLVVFMDIVKYLRPKYVLMENVVDILKFADGFLGRYAMSCLVAMNYQARLGMMAAGYYGLPQFRMRAFLWGALPSMVLPKFPLPTHDAVVRGIVPTTFSQSVVAYNEVDTRCLRKALLLADAISDLPKVGNDQPKDVIEYSVAPKTEFQRYIRNNRKDIQDYSFRGDDPSEEGKLFDHQPLKLNKDDYERVQRIPVKKGANFRDLKGVIVGPDNTVRLDPNISRERLSSGKPLVPDYAISFVKGKSTKPFGRLWWDETVPTVVTRAEPHNQIILHPSQDRVLTIRENARLQGFPDYYRLIGPLKEKYIQVGNAVAIPVARALGYALGLAYRGESDGDRAVLKLPESFIYADQETVVKSSAGTPGSEIADSEQLFEYFINPNFFCMMFAFLKVNVVIPLILDSKMGLSRRGAEEGEARRAVPFQNILSWEGWNRLDHRRGEIRLDVRREMDDSPLDNLFDGNGLDSSAGADSSSSTGSPPSSTSSSPPSSQSPPPGSSPPPASPPPSTPSAPPTNSSGSAPSPPSPSQSAPPANTGGGGSPPPSHGSPPAPKAVQSQPAPKRSGDGGSSSDSGSSKEGGSSSDRGKSESNGNRPGPEAAIIAGMVIGFFTFALLLAIVACVCCSKKKKRPPHMHMPYYTDENGKVYYANSMPRWQNSVDQGGGWHAQYSPGQAPPSSEMSGSHGAGPLPPPSPGMALGFSKSSFSYDELALATGGFSSANLLGQGGFGYVYRGVLAGSGKEVAVKQLKAGSGQGEREFQAEVEIISRVHHRHLVSLVGYCIAGSSQRLLVYEFVPNDTLEHHLHGLHIFPALFPAIVTRHSEGRAGDGLDDEARHRARLSQGPRVPSRRFLQGQILSVRPSNDLICCIVVVTYEGHPRIIHRDIKAANILLDENFDAKVADFGLAKLTTDTNTHVSTRVMGTFGYLAPEYASSGKLTDKSDVFSFGVMLLELITGRRPVDPTNYMEDSLVDWARPLLARALSEDGSFDELIDQRLENKFDRLEMERMAACAAAAVRHSAKRRPKMKQIVRALEGDASLDDLNEGVKPGQSMMFSTGSEYDSGNYASDINRLRKVAFESSIEDSSEYGTHSSADSGEPPRRQQHR

SEQ ID NO: 920 - protein, 1458 aa, Oryza sativa
MADDEAAVLPPPPPLPPPCRPHRQLRPRGSRPTADTTPRTSQLVEVFEAALRGNTIAVLDTGSGKTMVAVMLAREHARRVRAGEAPRRIVVFLAPTVHLVHQQFEVIREYTDLDVMMCSGASRVGEWGADHWKEEVGRNEIVVMTPQILLDALRHAFLTMSAVSLLIFDECHRACGSHPYARIMKIYIVEDRNELESFSPPTTIVNKYYDAYMVDFDNLKSKLQIFSDEFDSLLVGLQESPSNKFKDTDNILETSRKSLSRYHGKILYSLNDLGPIITSEVVKIHIESVKPLCDSEDCIFSKASLCLHMSYFKEALSLIEEILPQGYGELMKSESGSEELTKRGYISSKVNTLINIFKSFGSSNEVLCLIFVDRIITAKAVERFMRGIVNFSCFSISYLTGGSTSKDALSPAVQRFTLDLFRAGKVNLLFTTDVTEEGVDVPNCSCVIRFDLPRTVCSYVQSRGRARRNNSEFILMIERGNLQQQEHIFRMIQTGYYVKNCALYRHPNALSYDLSIQGMYTYQVQSTGATITADCCVNLIRKYCEKLPKDRYFMPKPSFEVTIEDGLFKCTLTLPRNAAFQSIVGPLSSSSNLSKQLVSLEACKKLHQLGELNDHLVPLTEEPMDTDFTTADEKCISGPGTTKRKELHGTTCVLALSGTWIHDSENITLNTYRIDFLCDQEGENYAGFVLLMEPELDDDVAPSKMDLFLIPNKMVYTTVTPRGKVQLNKKQLGKGKLFQEFFFNGIFGRLFHGSRKSGAQRDFIFKKGHEIQWNTESMYLLLPLRDSSYIQDDLSIHWEAIESCAGAVEQLWSSYQGDENVIPVNCIPQKRRGGQEEIIHLANKSLHCSSIKDSVVLSLHTGRIYTVLDLILDTTAEDSFDEMYGSTGKPLLMEKEQIHARVPPELLIHLDILEAITTLRCCETFSLERLELLGDSVLKYVVGCDLFLRYPMKHEGQLSDMRSKAVCNATLHKHGIWRSLQGYVRDNAFDPRRWVAPGQISLRPFPCNCGIETAFVPSHRRYIRDDPSFFVGKPCDRGHRWMCSKTISDCVEALVGAYYVGGGIAAALWVMRWFGIDIKCDMKLLQEVKFNASHLCSLSKINDIEELEAKLKYNFSVKGLLLEAITHPSLQELGVDYCYQRLEFLGDSVLDLLLTRHLYATHTDVDPGELTDLRSALVSNENFAQAVVRNNIHSHLQHGSGILLEQITEYVRSNLECQGKESEFLQHTTCKVPKVLGDIMESIAGAVFIDTDFNVDMVWEIFEPLLSPLITPDKLALPPYRELLELCSHIGCFLNSKCTSKGEEVIIEMSLQLRDELLVAQGHDRNKKRAKAKAASRILADLKQQQGLSIKQCLSKAKQLDIVTSDLQFDLTSLCFHSKWRKVDLEVRFSSYARFCSGQCQNSNLWNKGSGLLLLWMGRQQQTSIALFRQSPCTYLTQQPLHFKCLERLKIRLRESTW

SEQ ID NO: 921 - protein, 507 aa, Oryza sativa
MQAIGGDASVGNCSASACAPQTLEVDEEEDDTNWDEYDTAGNCDRTPHSDGSGDEDFFQEMSEKDEKMKSLVNMGFPEDEAKMAIDRCLDAPVAVLVDSIYASQEAGNGYSANLSDYEDTEFSSFGGRKKTRFVDGSKKRKRYGSGPSGNQVPFDGSHEEPMPLPNPMVGFSLPNERLRSVHRNLPDQALGPPFFYYENVALAPKGVWTTISRFLYDIQPEFVDSKYFCAAARKRGYIHNLPIENRSPVLPMPPKTISEAFPNTKRWWPSWDPRRQFNCLQTCMASAKLTERIRCALGRFSDVPTPQVQKYVLDECRKWNLVWVGKNKVAPLEPDEMEFLLGYPRNHTRGVSRTERYRALGNSFQVDTVAYHLSVLRDLFPNGMNVLSLFSGIGGAEVALHRLGIHMKTVISVEKSEVNRTILKSWWDQTQTGTLIEIADVRHLTTERIETFIRRFGGFDLVIGGSPCNNLAGSNRHHRDGLEGEHSALFYDYIRILEHVKATMSAV

SEQ ID NO: 922 - protein, 437 aa, Oryza sativa
MRIASSSGILMDANGKANGSAPSALVAYFLGMGFSREMVFRAIKEIGNDNNNTFPHLLQLLPFLSGDTDSEQILELLLTYQILEEEDEEEDVNWDEDDTVDNFDRATYSDGSGDEDFLQEMSEKDEKIKSLVSMGFPEDEAMRAITRCGLDASVDLLVESIYAPASAGNVYFTNLSDYEDTEFSSFGGRKKTKLIDGTKKKRERYRSRPQWNQVPFDGSHEEPMPLPNPMVGFSLPNDGLRSVHRNLPDHALGPPFFYYENVALAPKGVWTTISRFLYDIYPEFVDSKYFCAAARKRGYIHNLPIENRSPVLPIPPKTISEAFPSTKMWWPSWDPRRQFNCLQTYVASAKHTERIRCALGRFGDALPPAVQKSVLEECRKWNLVWVGKNKVATLEPDEMEFLLGYPRNHTRGVSRKRDIELLGIHSKLIQLHTTSLC

SEQ ID NO: 923 - protein, 473 aa, Oryza sativa
MRIASSSGILMDANGKANGSAPSALVAYFLGMGFSREMVFRAIKEIGDTDSEQILELLLTYQAIGSDPSVGNSSHSACDPQILEEEDEEEDVNWDEDDTVDNFDRATYSDGSGDEDFLQEMSEKDEKIKSLVSMGFPEDEDTEFSSFGGRKKTKLIDGSKKKRERYRSRPQWNQVPFDGSHEEPMPLPNSMVGFSLPNDGLRSVHRNLPDQALGPPFFYYENVALAPKGVWTTISRFLYDIYPEFVYSKYFCAAARKRGYIHNLPIKNRNYTRGVSRTARYRALGNSFQVDTVAYHLSVLRDIFPNGMNVLSLFSGIGGAEVALHRLGICMKTVVLVEISEVNMTLLRSWWDQTQTGTLIEIADVQNLTAERIELFIRRFGGFDLVIGGSPCNNLAGSNRYHRDGLEGKHSALFYHYYRILDSVKTIMASIFGAKGKLFRHVRKALLLKQSSSLTLKTEQDPSNNSDKDSMDK

SEQ ID NO: 924 - protein, 700 aa, Oryza sativa
MDLYMDDYIDPYEEAEAEAAAEAAGLTSAAAAEDSSDEGDSEDDSEAESDYEERSYGLLRSGNHRVRNPDGTFRCPFCPGKKKQDYKLKDLLQHADGIGASSKRRRHGRERAFHRAFARFVRTDPSFAQDLAAINGIATTADAISNSSAAGAKEKADANGDTDGSASVAAVAAGNRREEERFAWPWSGVLAAGAGFNAEDFADRVAMFGLDDVVPLVVDDAEGADSFAIVRFANGWGGFGDALTLENHFNKNKLGKNEWDARGSAGDAVKGDDGDTDVKVYGWVAREGDYNAGNVVGRYLRKHTNLTTIDEVSKSESEKSGKMVAILATQIEAKNRFLQDLETKKNATELSIARLEEDNRKLHDAYNEEMRNLHRRARDYALRVFQDNENLKLELDSRRRELNSRAKQLEKITAENASDRKKLDDQKQKAKDDNSELELASIEQQRADEDVMKLVEDQKREKEDVLARMLQLEKELHEKQQLELEVTRLNGTLQVMKHLEGDDDGDIHDKMEKLSERLEHEKKRLEELSGELVKKERESNDELQEARKELIMGLEDMLTGRTAIGIKRMGELDEKPFQNACKRKYGNDDYETKAAELVSSWQEEIKKPSWHPYKIITVDGEDKEVVDDDDTKLRHLWIEYGDDVCNAVKTALSEVNEYNASGRYVVPELWNFRKGRKATMKEVLKYIFGQIETTSKRRRP

SEQ ID NO: 925 - protein, 376 aa, Oryza sativa
MDKCGDSDDCISTSEAAERAAKLSEDKIKNLPVPGEVEFINGGPPCQGFSGMNRFNQSPWSKVQCEMILAFLSFAEYFRPRFFLLENVRNFVSFNKGQTFRLTLASLLEMGYQVRFGILEAGAYGVAQSRKRAFIWAAAPGETLPEWPEPMHVFASPELKITLPDGKFYAAVKSTAAGAPFRSITVRDTIGDLPAVENGAGKPTIQYGSGPVSWFQKKIRSDMASLNDHISKEMNELNLIRCKHIPKRPGCDWHDLPDEKVKLSTGQMVDLIPWCLPNTAKRHNQWKGLYGRLDWEGNFPTSVTDPQPMGKVGMCFHPEQDRIITVRECARSQGFPDSYRFAGNIQNKHRQIGNAVPPPLAYALGRKLKQAIDAKR

SEQ ID NO: 926 - protein, 353 aa, Oryza sativa
MESQRSDGVEESENGPTDEDNGVSDGENEDDLGADAEKWKRQEIDEMEYDDDAEKEEGFDMDSESEEDTKSKPESEDHQAKLDEELEESEEGHVLDSSNKGENLKAKQATARLEDEMNEAEDEKAQVTIKFKKNIKWTIHYESTGLNFEVHYALQEQPHILLAQIAQRTARSVFVKACKNIDRCEVNKPKKIDNNTINTPITLQTAGVNFEVFHKLVDYLDINEVRSNDIHAMLNTYGVEAARATIIGEVKGVFGAYGIHVDMRHLNLIADFMTFDGGYRPMSRLGMGQFSTSPFGKMTFETATKFIVEAASHGESDTLDGPSASVCLGKPVKVGTGSFGLLQNFSLEQPVAM

SEQ ID NO: 927 - protein, 577 aa, Oryza sativa
MYSDHDLEGEPGAPVGSWAACSISEAAYGALDHPVNSLEDSPLMNLQEVLKCHKGTNSLDHTGLLFLSKHLRKYRYGFEYASLEVKDHLERVDFSDMVDTVIILYGGSDMQKTKGNPWITHFHLNQETMKIKRLGLEFIVREIIDQYNTLRKQLNNAIPSVSISNSKCSVGNECVKNQTCCVTMVVQVEINSMSQLDVIKERVIPSILATLLKGFLEFKNVKVQCQEDNELVLKVGMSEHCKSGKFWATLQNACIPIMELIDWERSRPERVYDNFCSYGIDSAWKFFVESLRSTTDAIGRNIHRQHLLVVADCLSVSGQFHGLSSQGLKQQRTWLSISSPFSEACFSRPAHSFINAAKRDSVDNLSGTLDAIAWGKEPCAGSSGPFKILYSGKSHETKQNEHIYDFLHNPEVQALEKNVMDTYRKRTEKTSKRRSALNSEGNATINGGAISFNQKFLNAKVGIWENIIDMRTSLQNMLREYTLNEVVTEQDKSCLMEALKFHPRGYDKIGVGIREIKIGVNPGHPSSRCFIVLRNDDTTADFSYNKCVLGAANSISPELGSYIENRRSNRAVRPHQL

SEQ ID NO: 928 - protein, 1383 aa, Oryza sativa
MARPEEKLRCTKEPFIEDVGTRRIKSIRFSMFSGNEVRQSAEVQVWNSRIYNHEMKPVPNGLLDTRMGAANKLGECSTCHGSFAECPGHFGYLKLALPVFNVGFFNCILDVLKCICKSCSRVLLMEKDRLEFLKKMRNPKADPLQKSAIMKKVRDKCKLSRCPWCGFINGVAKKGRAGLIILHDCSKTLDGSTEELRDALSHKKEKLSISAVRMLDPAIVLSLFKRMTDEDCELLNLGDRPEKLIVTEIAVPPVPIRPSVFVAGGRMSNEDSITVILKSIANTNSILKENLQTGGQFMKCFDCWQHLQLQVVEYINSDAPSLPESQHRGLVQRLKGKTGRFRGNLSGKRTEYTGRTVISPDPNLRITEVAIPILMARVLTYPERVSYYNIEKLRQCIRNGPHKHPGANFIIQPDGTKLHLKYCDRRIAARDLKYGCVVERHLEDGDIVLFNRQPSLHRMSIMSHRARIMPWRTLRFNESVCNPYNADFDGDEMNLHVPQTEEARTEALMLMGVQNNLCTPKNGEILVASTQDFLTSSFLVTRKDNFYDRSSFSLLCSYLGDAMENIDLPTPALIKPIELWTGKQLFSVLVRPNACTKVFLNLTVKEKIYKTPKGSTLEPEAMCPNDGFVYFRNSELLSGQVGKATLGNGNKDGMFSTLVRDYNSHAAASCMNRLAKFSARFIGNHGFSIGVDDVQPGEHLNQEKKMKIDGGYKDCHDLIASYSKGALRLQPGCNAAQTLEQSITRVLNEIREEAGKVCMNTLHWRNSPLIMSQCGSKGSPINISQMVACVGQQSVGGRRAPNGFIDRTLPHFPINSKTPAAKGFVANSFYTGLTATEFFFHTMGGREGLVDTAVKTAETGYMSRRLMKGLEDLSVFYDQTVRNASGGIVQFLYGDDGMDPAKMEGKDGKPLNLDQLFMKVMATCPQRGQNTLSPGEILQILNDKLSEHDASSDDGCSEKFKQLLTYFLEDRIKLLKSTRRALLLDEDHVGERHSSFEESIAANISGISVKQLQVFLDTCLSRYHLKKIEAGASIGAIGAQSIGEPGTQMTLKTFHFAGVASMNVTLGVPRIKEIINAAKKISTPIITAELLSEKDVLSARIVKGSMEKAVLGEVAEAIKIVLKSSQPNLVVKLDMQRIEALHMGISADSVQLSILNHPKIKLKSEHVRVIDKSKLRIYPAGIDKSKLLYELHHLKSMLPKVIVKGIPTVERAVISETGEENDKRYKLLVEGTNLLAVMGTPGVDAMKTKSNHIMEVNRTLGIEAARRSIIDEIQYTMKSHGMNIDSRHMMLLADLMTYKGEILGITRYGIAKMKSSVLMLASFEKTAEHLFNASYSGREDQIEGVSECIIMGIPMQLGTGILKVRQRLDHLPEFKYQPDPILA

SEQ ID NO: 929 - protein, 1570 aa, Oryza sativa
MEGHPDPTSAATAMIPEASIRRINLSITSNEEILKAQPVNELEKPIPITHQSQLLNNPYLGLPLQVGSCQSCGSNAIEECEGHFRFIELPMPIFHPSHVTELSQILNLICLRCLKIKNRKKSTLKGSKFTSCSHCQELPPLCVAEVKKSNGARGLELRAPIKKELEEGFWSFLDQFGSCTRGTSHCRPLLPEEVQNIIKKIPEETRRWLSVRGYIPQDGFILSYLCVPPNCLRVSNVLDGNTFSCSGTSTNLLRKALRKIQQIRGSRIGSSNIQVDQVADDLQVDVANYINLGGTTKGHGDDTFTSQPTAMQWKQKMKTLFISKSSSFSSRGVITGDPYIGLNVVGVPEEVAKRMSVEEKVTDHNIAQLQDMMNKGLCLTYTDANSITYSLDAGKDNPNKKHTILKVGEIVNRRVFDGDIVFLNRPPSTDKHSVEAFYVQVHNDHTIKINPLICDPLGADFDGDCVQIFYPRSLSARAEAKELYTVDKQLVSSHNGKLNFQFKNDFSLALKIMCGREYSEREANQITNAMFSSGMYPQKPLIGGPYWTFPQILETTKSNAITLADHLDRESVGALATGTTISSILSTKGPREATEFLNLLQPLLMESLLIDCFSINLGDFTVPSPILEAIQNNPLELNKYREPIMDFITHSSAIGLLVDPKSDSNMNKVVEQLGFLGPQLQHNGRLYSSRLVEDCLSKSLHRCCGSTNCCNPLEEYGTVRSSIYHGLNPYEALLHSICEREKIMRASKGLVEPGSLFKNMMSRLRDVTACYDGSIRTSSGNLVLQFGSRDASNCVTPGDPVGILAATAVANAAYKAVLAPNQNNIISWDSMKEVLLTRASTKADANHRKVILYLNQCSCENECMERALTIRACLRRIKLEDCTTEISIKYQQQATQAAHHLVGHIHLDKKQLNQIETIMDSVLHKCQETFRNNIKKKGSMREILKTVTFISSTSLCDQHTDDDKKFQVSCLQFFLPGSITKNISESTERVIDFMTNAIFPIILDTVIKGDPRVEEANLVRIEPESTFWVQSSGAEQKGEAALEITVEEAAAAESGNAWGVAMNACIPVMDLIDTTRSMPYDIQQVRQVFGISSAFEKVTQVQLFPFLLLAEIQYLSKSVGMITKSVLQEHLTTVASSMTCTGDLHGFNNSGYKATCQSLKVQAPFMEATLSRSIQCFEKAAAKAYSDQLGNVVSACSWGNNAEIGTGSAFEILWNDENMSSSKSILGGYGLYDFLEAVETTGATKDKAIVPHNYCLYDVDCIPEDKVCLEENNQITWTDKPKAEFLMESEGRRAGMHSTGQKHPRKPNWHEGNTKSSPNSTAVEFTGQVFQRRQLKTKSNWNSDATQQDDKPSWYSSNSAGTQNFTIAGSSRPGEWNRKNNNRGQGGGREVWKSEGPHRGGSSSNRNQGGGRAVWKSEASHRGSGNNRNRGGGRAVWKSEASRRGGSMRQVASCAFTPVEQQIFEQIEPITKNVKRIIRESRDGIKLPPDDEKFIVTNVLMYHPERKKKIAGNGNYITVDRHQVFHGSRCLYVMSSDGSRKDFSYKKCLENYIRAQYPDAADSFCRKYFK

SEQ ID NO: 930 - protein, 2017 aa, Oryza sativa
MEEDQSAIPVAEGAIKSIKLSLSTEDEIRTYSINDCPVTHPSQLGNPFLGLPLETGKCESCGASENGKCEGHFGYIELPVPIYHPCHVTELRQILNVVCLKCLRVKKGKVKQTEGKDNTSALSCYYCRDLPALSLKEIKTADGAFRLELKMPPRKFMTEGSWNFLDKYGFHHGGTSHCRTLLPEEALNILKKIPEETKRKLAARGYIAQSGYVMKYLPVPPNCLYIPEFTDGQSIMSYDISISLLKKVLQKIEQIKKSRAGSPNFESHEVESCDLQLSIAQYIHLRGTTRGPQDNTKRFAISTDPSALSTKQWLEKMRTLFISKGSGFSSRSVLTGDPYIGVDVIGLPSEVAKRITFEEQVTDINLNRLQEIVDKGLCLTYRDGQATYAITVGSKGHTTLKVGQTISRRIVDGDVVFLNRPPSTHKHSLQAFRVYVHEDHTVKINPLICAPFAADFDGDCVHIYYPQSLAAKAEALELFSVEKQLTSSHSGKVNLQLVSDSLLALKHMSSRTMLSKEAANQLAMLVTCSLPDPAVIKSKPYWTISQIVQGALPKALTSQGDKHVVRDSTIIKLDLDKESVQTSFSDLVYSTLSVKGPGEALQFLNVLQPLLMELILLDGFSVSLQDFNVPKVLLEEAQKNIEKQSLILEQSRFAENQVVEMRVDNNLKDIKQQISDFVVKRSHLGLLIDPKSDSSVSKVVQQLGFVGLQLYREGKFYSRRLVEDCYYTFVNKHPAVREEHSPEAYGLVRSSYFHGLNPYEELVHAISTREAIVRSSRGLTEPGTLFKNLMALLRDVVICYDGTVRNVCSKSIIQLNYTEDDALDFPSAIGPGEPVGVLAATAISNPAYKAVLDASQSNNTSWERMKEILQTTSRYKNDMKDRKVILFLNDCSCAKKFCKEKAAIAVQGCLRRITLEDCATDICIEDGNWAAPAGFQHPVPPPQCKILPVPIPIPAHGSVKFPPVPIPAPEHLKYNIHVVRYQKQIGLDGTSEAAPALVGHIHLDRAHLERINISTEDILQKCQEVSGKYGKKKGHLSNLFKNITFSTCDCLFTQKLVDGKLPKLPCLQFFVSDNMIVSESVERAVSVLADSLCGVLLNTIIKGDPRIQEAKIVWVGSDATSWVKNTQKASKGEPAVEIIVEEEEALHIGDAWRTTMDACIPVLNLIDIRRSIPYGIQQVRELLGISCAFDQVVQRLSTTVRMVAKDVLKDHLVLVANSMTFTGNLNGFNNAGYKATFRSLKVQVPFTESTLITPMKCFEKAAEKCHSDSLGCVVSSCSWGKHAASGTGSSFQILWNESQLKSNKEYGDGLYDYLALVRTDEEKARYTFFDDVDYLAEENEADVCLSPELDGTIGQPIFDDNLEEQDVQNNSSWDNGTTTNASWEQNGSAGNDSDKWGGWNDAAAGADTGVTKPANQGNSCWDVPATVEKSSSDWGGWGTEKAKEKEKISEEPAQHDAWSVQGPKRATDGGASWKKQSSTQNDGNSWKENKGRGSNGGSWEKDNAQKGSWGRGNDEAENNNDVQNKSWETVAADAHASTEKSWGNVTASPSDNAWSAAPVSQGNGSSDTKQSDSWDGWKSAGVDKAINKDKESLGNVPASPSFSAWNASPVSQGNERSDAKQSDSWDGWKSAGVDKAINKDKESLGNVPASPSFSAWNAAPVSQGNERLDAKQSDSWDGWKSAGVDDSVKDKESWGNVPASPSDSAWNAAPVSQGNESSDAKQSDSWDGWKSAGVDASTNKDKESWGNVPASPSDSAWNAAPVSQGDDVWNSAEANESRNKDWKSDGWGARGGNWRGQRNNPGRPPRKPDGRGLPRRPDERGPPRRHFDLTAEEEKILGEIEPTVLSIRKIFRESIDSIKLSPEDEKFIKENVLEHHPEKQSKVSGEIDHIMVDKHQVFQDSRCLFVVSSDGTRSDFSYLKCMENFVRKTYPEHGDSFCKKYFKRRRDQPPAADGGTAPGTPAGATQSTAVDTQEGTSQQTQPDIATAPAATQQETLQDTPAPPADDGLLGKGPSPSD

SEQ ID NO: 931 - protein, 1257 aa, Oryza sativa
MWDEKERPRVFCLAPQDGEAVWWLAMEDPEITGQQSPNATSIVTDLMDLDDIIVEGNEVQFAMDVDLRAIPSLKDGGHTDPLVQIPGDMSHMDVDLRVIPSLKDGGHADPPVQVPVDKRIASLEKLCKEASRSFFRETRLVSHQINSYNDFVSHGLQKMFDSLDEVTVEPDYDPSKKVGPWRHATIKFGRVELEEPVFWVDNCDLDVETLKLKPKHARLQKMTYSSKMKVEMTVQVYSLHKSDKAKTGEDPYIQRKDIMKETKWVTIGKLPVMESECEYDFGGYFLIKGMEKVFVAEEQRCLSRIWINDSPTWEACYQRSQIRREKISIKPVQSNDGFRKVINLYFLGATIPIWIMFFALGVSSDKEAFDIIDIQECDASMANIISATITESHEQCEGFQREGRASEYIDKLIRNTKFPPKGSFDEYIGRHMFPDVSGNRSKALFLGYMVRCLLLASSGNRKSDNRDDFRNKRLDLACELLQRELWVHIMHAQKRMVKVMQRHLSGDGDLQPLECYVHASIVTNGLNRAFSTGSWCHPFNKRERCSGIVATLRRTNPLQMMSDMRKTRQWVAYAGKAGDARYPNPSYWGKLCFLSTPDGEKCGFVKNLAITAIVSCLAREPSVDALVSCGMKKLDELLLQEISGKDRIFLNGNLVGVCADSVEFVLHLRSMRRRKQIDAQVEIKRDKQNKEVRIFSDPGRILRPLLIVENLRNIMNRKNGSYSFQELMDQNIIELIGVEEEEDIRCAYGIRHLFAGDEEKNFSFYTHCELDPSFLLGLSCSIIPFANHDTAKRILMQAEKISQQAIGYSTTNPLFRVDTHSHQLYYPQRPLFKTVAADCLGKRDYTSGSKHDFARPEYFNGQNAIVSISVHQGFNQEDSLVLNRASLERGMFRTQHFKSYKALIENKEITKRLKHKENINFGKTPSKKGLVDSLDIDGLPYIGASLQSNDIIIGKVSDSGEDHSIKLLHTEKGIVEKVVLSATDDGTNSAFVTLRQTRSPRIGDKFASMHGQKGVIGFLDSQENFPFTHQGIVPDIVINPHGFPTRQTPGQLLEAALGKGIALGGATRYATPFTSPSVEVITEQLHKAGFSRWGGESVINGRTGERAASPVFTGPTFYQRLHHMAEDKVKFRNTGPVHPLTRQPVEDRRRYGGVKFGEMERDCLLAHGAAANLHERLFLLSDVSRLHVCRRCQRAAVVVSPAVAADGGGGRKVRGPYCRFCRSAEEVVRVSVPYGAKILYQELFSMGICLKFDTELI

SEQ ID NO: 932 - protein, 1252 aa, Oryza sativa
MEEPSKDNGQSSCVVDPELEPMMLDDAREGVSHTLDDANGHSSMDVDRGCHSMDTTRSSLGDDGKGKRDSYAQIPVDMSIPSLEKFCKEASRSFFDEIGLISHQINSYNEFVSHGLQELFDSLGEVTVEPSYDPSNRGPGGWRHAIIKFGRVQLEEPVFWSHGCDIDEQSLKLKPRHARLQNMTYSSKMKVEVHFQVYSMEKSDKAKTGNDKFGYKRNIINETYYINIGRLPVMVMSNLCWLHKLKESDCQFDSGGYFLIKGMEKVFIAQEQKCLTRIWVEDRPCWMVSFLSPIRRRRIYIKLIDSANNEDASGGKIISISFLYANMPIWLMFFALGISSDKDIFDVINMEDCDACVINTITATIKESDELCEGFRKSDKARQYVDELIKNSKFPPAEPFDDYIAKYLFPSISGNRNKALFLGYMVKCLLMAFTGKRKCDNKDDFRNKRLDLAGELLGRELRAHIRHAERLMVKALQRDLNSERELQEFDHYLDASIITNGLNRAFSTGSWCHPYKRNERCAGIVATLRRTNPLQMISDLRKTRQRVAYAGKAGDARYPNPSYWGKLCFMSTPDGENCGLVKNLAVTATVSSRVAPPLIDRFISCGMNKLHEIPTEEVPRMDKIFLNGDWVGSCSDPASFVLRLRCMRRSGLIDPQVEIKRDKHQREVRVFSDAGRILRPLLVVENLNKIRRPKGSSYSFQWLMQQEIIEFIGVEEEEDIRSAWGIRNLFESEEEAPMVKMNKAEDVFNVKRKIGGEVSGYTHCELDLSFLLGLSCGIIPFANHNFARRVLYQSEKHSQQAIGYSTTNPHIRVDTLSHQLYYPQRPLFKTVIADCIGRSEYTFGRKDDFARPEYFNGQNAIVAVNVHQGFNQEDSLVMNRASLERGMFRTEHFRNYKAEVENKGGPGGNKRLKMKDKIDFGKMQSKRGRVDNLDDDGLPYVGASLQSGDIVIGKVSESGEDHSIKLKHTEKGMVQRVLLSANDEGKNFAVVTLRQVRSPCLGDKFSSMHGQKGVVGFLESQENFPFTYQGIVPDIVINPHAFPTRQTPGQLLEAALGKGIALGGTMRYATPFTTASFDVITDQLHKAGFSRWGAESVLNGRTGERMHSLIFMGPTFYQRLIHMAEDKVKFRNTGPVHPLTRQPVADRKRFGGVKFGEMERDCLLAHGAAANLHERLFMLSDFSQMHVCQTCERVANVIMRPVPGGKKIRGPYCGFCRSSENIVRINVPYGAKLLYQELFSMGICLRFETEVC

SEQ ID NO: 933 - protein, 1136 aa, Oryza sativa
MPTAAAAATASLRVSNIPPSAVAAELLAFFDSAVAVAGGAFACEIAAAHRGWLSRGHGTVQFGSAAAAAAAAGLASSGRLPRFLGALLSVSPSPVDLLPRASDLSLRAAGAGLVVGDRVAERVFEAADAWDGVRAEVIPGKRRVDLYLEHDSQRYKLEVLFEDMKDCLGCTLDGMGAILLQLNYAPRIHTAISGPAVNSRFMDDRFHACKEDAKFSWVRALDFTPNYSFGRCSTLVLKLGKSALVSDILKSLPFSGNLGELTMNSMDGVGASSNVVPLVHCPRDYSVPYEVLFRLNSLMHMGKIVAKHVNADLFKALQELPVDVSRRIFEKMHKLESTCYGPLQFIQQEAYSMKRSHNVLLSNEGEGEGERKLMKCYRVNITPSKIFCFGPEEEVTNYVVKHHSAYASDFVRVTFVDEDWSKLSSNAISARIEQGFFSKPFKTGLYYRILSILKKGFSIGPKNFEFLAFSASQLRGNSVWMFASNASLNAGGIRRWMGHFENIRSVSKCAARMGQLFSSSRQTFEVLRWDVEVIPDIEITTDGSKYIFSDGIGKISLRFAKRVAHHVGLDPTNLPSAFQIRYGGYKGVIAIDPMSSIDLSLRPSMKKFESESRMLNITSWSKSQPCYVNREIISLLSTLGIRDEIFVAMQQDEMRETEEMLTNKEVALSVLGKLGGSETKTAVKMLLQGYEPSSEPYLSMILKAHQENRLTDIRTRCKIHVPKGRVLIGCLDETGVLEYGQVYIRITKNSKEQKDSNQSYFYNDDGKTATVVGKVAITKNPCLHPGDIRVLEAIYDPDLVGMVDCLVFPQRGERPHPNECSGGDLDGDLYFITWDDKLIPEKVDTPMDYTATRPRIMDHVVTLEEIQKHFVDYMINDSLGAISTAHLIHADRSPLKARSPECLQLATLHSMAVDFAKTGAPAEMPRTLRPREYPDFMERWEKPMYISNGVLGKLYRSAMGHMEKSGDSGALSSSSAQPSPTYDPDLEVPGSDEFLQAAEEYYELYEEKLTTLMNYYRAELEDEILTGNIRNKMLYLKRDNKRYFEMKDRIVAAVDALHREARGWLLSSRKEEDASRMASAWYRVTYHPDRRRGKRFWSFPWIACDNLLAIKASSQLRRRRQKDDDSTAVVQMDCSA

SEQ ID NO: 934 - protein, 1218 aa, Oryza sativa
MRSPRGGAAAQPSGRRGDTTAAAAGDLVTTQVSLGGFDAGVAAGDLADFLEHEVGLVWRCRVKTSWTPPDSYPDFALPTAPASASAAAAPPRYDRVPPHAFVHFARPEGARRAADLAGETRLILRGKPLRVASAPDSSLRVSRRSSIAPFRFPDVRLEVGALPSPGAFLAAWRGPDAGLDLSVDPFDGCCRLVFTRDTAFTFPGFREVAAIRCDVKLEFPVRDVLEVRLYRLDCSLLLRLAAAPLVHYRTADDDFHEPVPFDLLDDDDPWIRTTDITPSGAIGRCGVYRISFSARFWPKMDRALDYMRERRVAIVDCGGGWGPRRGLTVRDELEFGEPMQDVFFCLQHAEGLKFPLLFMVNALVHKGIINQHQLTPEFFSLLGRSEENVNVAALRDFWGDKFPVFDACGRLKKALNRVARNPKLLCSKVGDDHAEVRRLVITPTRAYCLPPEVERSNRVLRHYHEVADRFLRVTFMDEGMQVLNNNVLNSFTAPIVKDLMSNFFQQKTTVYKRVRMLLTEGFHMCGRKYSFLAFSSNQLRDKSAWFFAEDRKTTVEAIRKWMGRFTSKNVAKHAARMGQCFSSTYATVTMRPDEVDESFDDVVHNEYIFSDGIGKITPDLALEVAERLQLTDNPPSAYQIRFAGFKGVIAVWQGHGDGTRLFLRPSMRKFESNHLVLEVVSWTKFQPGFLNRQIIILLSSLNVPDSIFWQMQETMLSNLNNILSDRDVAFEVLTTSCADDGNTAALMLSAGFEPRTEPHLKAMLLAIRSAQLQDLLEKARIFVPKGRWLMGCLDELGVLEQGQCFIRATVPSLNSYFVKHGSRFSSTDKNTEVILGTVVIAKNPCLHPGDVRILEAVDVPELHHLVDCLVFPQKGERPHANEASGSDLDGDLYFVTWDEKLIPPGKKSWNPMDYSPPEAKQLPRQVSQHDIIDFFLKNMISENLGRICNAHVVHADLSEYGAMDEKCIHLAELAATAVDFPKTGKLAIMPPHLKPKVYPDFMGKEDGQSYKSEKILGRLYRSIQEASNGDVVSQEVCTPNDLPYDIDLEVPGASDFLASAWQCKCSYDAQLSALLSQYRVRTEAELVTGHITFLVKNSSKKQGDIKDRLKTAYSALRKEFKSTFESIASDQCEIGDDEKNLLYEMKASAWYQVTYHPKWVEKSRGILGPDGEEIPASLSFAWIPVDYLARIKLRCHGKVRVEGQKPVERLAAYISERI

SEQ ID NO: 935 - protein, 609 aa, Oryza sativa
MASAGDRRGGGGPPGSGDDSGGGWETVEKRVKKPAQQVGKGQWGQWNSPNAAPAPTAPRSGSGAFHHSGNTLVRHSDRRPARGTPRPPPQNRSIEAELQAPHGVVTAPLANGWQWGARSCPPGTESKEGGLPLSGCDPETDNAEGYDTSDDDNDDDMSDDLSDDYDSDASEKSFETRKNHKLFKGFFEVLEALSVEQLNEPTRQWHCPACKNGPGAIDWYKGLQPLMTHAKTKGSIKVKRHRELASLLEEELSRRGTSVVPSGEQFRKWKGLRESTDREIVWPPMVVVMNTVLEQDEDDKWKGMGNQELIDYFSEYAASKARHAYGPNGHRGMSVLIFDSSAVGYMEAERLHDHFVRQRTDRNTWNSAHKVTFLPGGKRQLYGFLATKDDMETFNRHCHGKSRLKYEMRSYNEMVVTQMKQMSEDNQQLNYLKNKMVKKEQHSKLVEDTLSVVTQKLRETMEENTIVRNKAKEKHLEYEKEMKYQEEFFHDQIEKIHKATEEKEIKFEKLLQEERAKARQSDVDSGSTEDRRQRKEKIQNFIDCQVKDVEEFEAERDKLIKLHEEKKVKLKKEYLAKEFELEKELDTALTSLMDKHKPDIFKSSTSPST

SEQ ID NO: 936 - protein, 682 aa, Oryza sativa
MPGGRRGGGGRPGSGSSSNGGGSGYSWVEKKSKKSEKSVGKGQCAPCTSSNAAPKPAMAWQARSGNGSLHPPGNGRVQHSDHRPAARGSPRSLPQNKHTETKLQAPCPVVTAPLANGLQWVPKSRSSGSESNMDDAPTSGSDPEMDNGATHPVVTATLANGLQWVPRSRSSDSQSNKDDAPTASSDPETDNVAPHPVVSAPVANGLQWVPRSHSSGSEMDNGEDYDSYDDDSDDDMVDDTSGDFDSKASEKNFETRKRHKLLKSIFELLEKLSVEQINEKTRQWHCPACKNVRGGVTWYKGLQPLMNHARTKGSKRVKLHRELAALLEEELYRTGISMASSGEFFGIWKGLRENTDRPIVWPPVVIIMNTRLEQDKDGKWKGMGNKELLSYFSKYHVKEACHAYGPDGHSGMSALIFEGSAVAYKEAERLHNHFVDQRTDKYAWLNHRIVIPGGKRQLYGFLAEKEDLEAFNRHHGKDYLKYEMKSYNEMVVTQLKQMSEDNQQLNYVKNEMVKTERHSKEVEEALGVETQKLQGAIEDNIILKRKTKEMLSECVEQMEFNAKFYHEQIERLRKDTEEKENEFERLLQEELARAIECDVDSETTENCKLREEQIQRIIDCQVKDAEEFDAEQDELIKTHEEKKANVKMEYMAKDVELEEELYAALTSLMEKHKPDIFQPSSP

SEQ ID NO: 937 - protein, 684 aa, Oryza sativa
MEMDTSPSSSAPSSPAASSDSIDLNFLPFLKREPKSEPASPERGPLPLPAAAPPPPPPPPPPPPPPQVQAATVATPVPATPDLSAAAVMTPLQSLPPNPEEETLLAEYYRLATLYLSSAGAAGVIVPAAAPEASAGAVAQPGSGSGAKKRRPRSSELVRVSSLSVQDQIYFRDLVRRARITFESLRGILLRDDERAEVLGLTGVPGFGAVDRRRVRADLRAAALMGDRDLWLNRDRRIVGPIPGISVGDAFFFRMELCVLGLHGQVQAGIDFVTAGQSSSGEPIATSIIVSGGYEDDDDRGDVLVYTGHGGRDPNLHKHCVDQKLEGGNLALERSMAYGIEIRVIRAVKSKRSPVGKVYFYDGLYKVVDYWLDRGKSGFGVYKYKMLRIEGQESMGSVNFRLAEQLKVNALTFRPTGYLGFDISMGREIMPVALYNDVDDDRDPLLFEYLARPIFPSSAVQGKFAEGGGGCECTENCSIGCYCAQRNGGEFAYDKLGALLRGKPLVYECGPYCRCPPSCPNRVSQKGLRNRLEVFRSRETGWGVRSLDLIKAGTFICEFSGIVLTHQQSEIMAANGDCLVRPSRFPPRWLDWGDVSDVYPEYVAPNNPAVPDLKFSIDVSRARNVACYFSHSCSPNVFVQFVLFDHYNAAYPHLMIFAMENIPPLRELSIDYGMIDEWVGKLTM

SEQ ID NO: 938 - protein, 740 aa, Oryza sativa
MMDWFMSTVYFYGPEINVSNRVVRNFSSDIENFLRISFVDEDCEKLRATDLSPRSASGHDANRTALYKRVLSVLSDGITIGGKNFEFLAFSSSQLRDNSAWMFASRQGLAASDIRTWMGDFRNIRNVAKYAARLGQSFSSSTETLKVQKYEVEEISDIKNGTQHVFSDGIGKISSAFANEVAMKCNLKRFAPSAFQIRYGGYKGVVAVDPTSRWKLSLRKSMLKFQSDNITVDVLAYSKYQPGFLNRQLITLLSTLGVRDSVFEQKQEEAVNQLNKMVTDPQAAIEAIELMPMGEITNAVKELLLCGYQPDDEPYLSMLLQTFRASKLLELKTKSRILIPKGRAMMGCLDETRTLKYGQVFIRATSGVNDNDRFTVTGKVVIAKNPCLHPGDIRILHAVDVPVLHHMFNCVVFPQQGPRPHPNECSGSDLDGDIYFVSWDPSLIPPRMVTPMDYTPAPTETLDHDVTIEEVEEYFTNYIVNESLGMIANAHVVFADKEDLKAESSPCIELAKLFSIAVDFPKTGVPALIPPELHVKEYPDFMEKLDKVTYESKGVIGKLYREIKKHTPHIKHFTREVARRSYDTDMIVDGYEDYITEAMALKDEYDFKLGNLMDHYGIKSEAEIISGCILKMAKNFTKKSDADAIRLAVRSLRKEARSRFSEMSLDDNGHGHDASEAKASAWYHVTYHPEFWGCYNEGYERPHFISFPWCIYEKLLRIKQRRKFVRKMQPELFSLHNLRI

SEQ ID NO: 939 - protein, 1052 aa, Oryza sativa
MASRGGDGLVGGGRGPLGGRDGRGRGPAGGRGGGRGGGHPQQQQQQQPGYGRGDGGGRGPAPAAGGVVGRGTGGGGGGGRGDGGRGRGRGGGGGDGVRPAMAAAPAASTPGPVAVAARSTPPPTPAVQIPAVASSSSAQPAAAAQPPPAAAAVSALARDVGRQLAVVAGGGRPAPPAAPPAPIPVSSKGVAPPSRPGFGTVGERIVVRANHFLVRVSDNDMIYLYDVSLSPPPKTRRINRVVMSELARLHRESHLGGISFAYDGSKALYTAGKLPFDSMDFKIKLGKELREIEYKVTIRRAGQADLHHLHEFIAGRQRDSQQQTIQALDVVLRESPSLNYVIVSRSFYSTMFGRQDIGDGLECWKGYYQSLRPTQMGLSLNIDISSTPFFKPISVVEYVKNCLGTPTNANGPDPRRPLSDIDRLKVKKALRGVRVETTHQGKSSKYKITTITSEPLSQLNFSMDGTTQTVIQYFSQRYKYRLQYTSWPCLQSGNPSNPIYLPMEVCTIVEGQRYSKKLNDKQVTGLLRATCQPPQKREQKIIEMVQHNNYPADKVVSDFRINISNQMATMPARVLPAPTLRYHDSGKEKTCNPRVGQWNMINKKMVGGAVVQKWTCVNFSRMHIDAVHRLCGELVYTCNAIGMVFNEMPEIEVGSAAPNNIEAALSNIHTRAPQLQLLIVILPDVNGYYGRIKRVCETELGIVSQCLKPGRKLLSLDRQFLENVSLKINVKAGGRNSVLQRPLVPGGLENTTIIFGADVTHPASGEDSSASIAAVVASMDWPEITKYKALVSAQPPRQEIIQDLFTMTEVAQNADAPAQKAEGSKKNFICGGMFRELLMSFYSKNAKRKPQRIIFYRDGVSDGQFLHVLLYEMDAIKKAIASLDPAYRPLVTFVVVQKRHHTRLFPEVHGRQDLTDRSGNVRPGTVVDTNICHPSEFDFYLCSHAGIQGTSRPTHYHVLHDENRFSADQLQMLTYNLCYTYARCTRSVSVVPPAYYAHLAAFRARYYDEPPAMDGASSVGSGGNQAAAGGQPPAVRRLPQIKENVKDVMFYC

SEQ ID NO: 940 - protein, 1058 aa, Oryza sativa
MAYRGGGRGGRGGEQRPPYSGRGDVPGRGGGGGGGGAPPYRPASGFVWPPPGMTPRPGPPQPQYPRPGPPAVVYGAPMPAAHHQGAYQPGGVYRAPSPGVPVIGGYARSTPVTIRAPPPSHSSAPAPYQPAAAAPAPSSSSTAPSATALAKEFEQKLFVSETALAPPAAVASAAAAPAGEASVESDKDLAPVSKKGLAHPARPGFGAAGKKVMIRANHFLVNVADNNLFHYDVSINPESKSRATNREVLNELIKLHGKTSLGGKLPAYDGRKSLYTAGSLPFESEEFVVKLIDPEKKDKERAEREYKITIRIAGRTDLYHLQQFLLGRQRDMPQETIQVLDVVLRESPSWNYVTVSRSFFSTQFGHRGDIGEGLECWRGYYQSLRPTQMGLSLNIDISATSFFKPVTVIQFVEEFLNIRDTSRPLSDRDRVKIKKALRGVRIETNHQEDQIRRYKITGITPIPMSQLIFPVDDNGTRKTVVQYFWDRYNYRLKYASWPCLQSGSDSRPVYLPMEVCKIVEGQRYSKKLNDKQVTNILRATCQRPQQREQSIHEMVLHNKYTEDRFAQEFGIKVCNDLVSVPARVLPPPMLKYHDSGREKTCAPSVGQWNMINKKMINGGTVDNWTCLSFSRMRPEEVQRFCGDLIQMCNATGMSFNPRPVVDVRSTNPNNIENALRDVHRRTSELLAREGKGGLQLLIVILPEVSGSYGKIKRVCETDLGIVSQCCLPRHASRPNKQYLENVALKINVKVGGRNTVLERAFIRNGIPFVSEVPTIIFGADVTHPPPGEDSASSIAAVVASMDWPEITKYRGLVSAQPHRQEIIEDLFSVGKDPVKVVNGGMIRELLIAFRKKTGRRPERIIFYRDGVSEGQFSHVLLHEMDAIRKACASLEEGYLPPVTFVVVQKRHHTRLFPEVHGRRDMTDKSGNILPGTVVDRQICHPTEFDFYLCSHAGIQGTSRPTHYHVLYDENHFTADALQSLTNNLCYTYARCTRAVSVVPPAYYAHLAAFRARYYVEGESSDGGSTPGSSGQAVAREGPVEVRQLPKIKENVKDVMFYC

SEQ ID NO: 941 - protein, 973 aa, Oryza sativa
MAPPRHQPAAGKAGGGRGHGHGHGHGGGGGGPAARKQPLQSSMAQPKAETAAATAAVAPPEGGKKCGGGGGRRRGGRGRGGRAGAGPGPGLAAAPAVVVAPAARAVIGPPVASKGLSFCRRPGFGTVGARCVVKANHFLAELPDKDLTQYDVKITPEVSSRSVNRAIMSELVRLYHDSDLGGRLPAYDGRKNLYTAGTLPFDAREFVVRLTDDDDGTGVPPREREYRVAIKFAARADLHHLRQFIAGRQADAPQEALQVLDIVLRELANRRYVSIGRSFYSPDIRKPQRLGDGLQSWCGFYQSIRPTQMGLSLNIDMSSTAFIEPLPVIEFVAQILGKDVISRPLSDANRIKIKKALRGVKVEVTHRGNVRRKYRISGLTTQPTHELIFPIDDQMNMKSVVEYFKEMYGFTIQHPHLPCLQVGNQKKANYLPMEACKIVEGQRYTKRLNEKQITSLLKVTCRRPREQEMDILQTVQQNGYEQDPYAKEFGINISEKLTSVEARVLPAPWLKYHDTGKEKECLPQVGQWNMVNKKVINGCKVNHWACINFSRSVQETTARGFCQELAQMCQISGMEFNSEPVIPIYSARPDQVEKALKHVYNMSLNKLKGKELELLLAILPDNNGSLYGDIKRICETDLGLISQCCLTKHVFKISKQYLANVSLKINVKMGGRNTVLLDAISWRIPLVSDIPTIIFGADVTHPETGEDSSPSIAAVVASQDWPEVTKYAGLVCAQAHRQELIQDLYKTWHDPQRGTVTGGMIRELLISFRKATGQKPLRIIFYRDGVSEGQFYQVLLYELDAIRKACASLEPNYQPPVTFVVVQKRHHTRLFANNHKDRSSTDKSGNILPGTVVDSKICHPSEFDFYLCSHAGIQGTSRPAHYHVLWDENNFTADEMQTLTNNLCYTYARCTRSVSVVPPAYYAHLAAFRARFYMEPEMSENQTTSKSSTGTNGTSVKPLPAVKEKVKRVMFYC

SEQ ID NO: 942 - DNA, 3690 bp, Triticum urartu
  source 1..3690: mol_type = genomic DNA
atggaaaaaattgttggtactggcaacgtctttgcgatcaagctcaggcctccaaagaacatctctgcaaactcaaaatcttttgccattgttcagttccagtctgaggcacatgcttcgctggtgttgaatgcggcccgacggaatgcacttaggagtggaagtaatcatctgaaggcccgatatgcagagcgtgacattgttccaagaccgagaactacgatttttaatctacaggatgcaacactgcattttggctgccttctgagggaaaaagttctatctgttctgtggagcggaacaaatgtttccgttgagtttggatttgctatgaagaggattgacttttgcctgatctacaactcgaagaaatacaaacttgaactctcctacgagagcatatgggagatccagcttcatcgtccacctgggttgcaaaaaaagttccttctgattcagttgtttctgtttattgaaagctcagagatttttgttaacctcagttggagaaatgtatccgtttctcaggttcaggctgctccgaaaatttacgaacaaaatatacgccgttctggttctatgtacgatgatcctttattcaactattctagggatgatacagatgaccagtggaccagaacaactgattttaccccatcagccagcattgggcaatcatatatcctatgtctggagctaccacatatttgttatctcccgaacatccgagagtactttgtttactatgaagtacacgatgacgtcttccatctccagcgtggacattcatattcaagcaatacttgctttgttccagttgtgaaatctcatcatttcactgatgtcccctacgagatactctttaagatcaaccacttggttcagaatgggacacttagtgggccaacacttgatgacaacttctaccgtctggtcagcccaggatatgaatgtattgaccatataaagcgtgcacttgaaaagatgtcatacctaaaaaagacttgtttgaatccaacaaagtggttatctgaacaatacaaaaaaaatcgaagatcacgctacatgttaaaatcaccaaacataaccctggatgatgatgggttggtatatgtctacagggtgcaaattacccctgcgaaagtgtacttttatggtcctgagattaatgtctcgaatcgtgttgtacggcattacgctgctgatttggataacttccttcggatttcgtttgttgatgaggactgtgagaagcttcgttcaactgatttatcacaacgctctgctccaggaaataatacaaggaggactgctctttataacagagttctttcggtcctttcaaatggcatcactatcggtgacaagcactttgactttctggctttttcttcaagccagctccgagataactctgcatggatgtttgcttctcgaacggggttatctgccagtgacatcagggagtggatgggggacttccgtaatattagaaatgtggcaaagtatgctgcaaggcttggtcagtcttttagttcctcaacagaaactttgaaagtgcataagtacgaggtgaaagaagctccagatgtaacaaacggaacaaagtatgtattctcggatggaattggaaccatttcagctgattttgcagatgaagtgtctaagaagtgcaacttgacctgctttactccctccgcttttcaaataaggtatggaggttacaaaggtgttgtcgctattgatccaacatcacgctggaaactatctttaagaaaaagtatgtcaaagtttcagtcagaaaacatcacacttgatgtccttgcatacagcaagtaccagccatgtttcctgaaccggcagttaatcactcttctttcgacactcggagtcagagatagcatatttgaactgaagcaacaagaagctgtgaagcagttgaacagaatggtagctgaaccacaagctgctattgatgcaattgagcttatgcccatgggtgaggttacaaatgttgttaaagagttgctgttatgtggctaccagccggatcttgaaccatatgtttctatgcttctacaaacctttagagcatccaagctgctagaattgaaaacgaggtcaaggatatttgtcccaaaagggcgagcaatgatgggatgcctggatgaaacccgcacactggagtatggacaggtattcattcaagtttctaatagtgcagataaccgtggaaagtccatcgtaactggaaaagttgtcgttgccaaaaacccttgcatccaccctggtgatatccgtattctccaggctgttcaaagtcctcttttgggccacatggttaactgtgttgtctttccacagctggggccaaggcaagtatttagtaatgcattcttctatgttttccagcctcatcctaatgaatgttcagggagtgatcttgatggggacatatattttgtttcatgggacccagatctcattccaactcgtatggtggcgcctatggactatactccagcaccaacagaaacattagatcatgatgttatgattgaggaagtacatgagtatttcacaaattacatagttaatgagagtctgggaatcattgccaacgcacacgtagtctttgcggatagggaaatcctgaaggctgaaagtacaccatgcattaagctggcagagctcttctccattgctgttgattacccaaagacaggagtgccggctcaaattccgcctgaactacatgtgaaggagtacccagatttcatggagaagctcgacagggctacctatgtatccaagggagtaatagggaagctctaccgggaaattaagaagcagaaccctcacattggacacttcacaaaggatgtggcaaggcggtcctatgacactgatttgatagttgatggctaccaagactacattaccgaagctgtgtggttcaaggaacagtatgacttcaagctgggtaatctgatggagcactacggaataaatagcgaggctgagataataagtggatgcattcttaagatagcaaataattttaccaagaagaacgacgccgatgctatcaggctggcggtgaaatctttgcggaaggaagcaaggtcatggttctgcgagatgggttcagatgagagcggaggtggtcacgaggcctcggacgccaaggcatccgcttggtatcatgttacctatcaccctgagtactggggttgctacaatgaaggatatgatcaccggccacacttcatcagctttccgtgcttggatgatgaagaatgggaagtgaggttccatttcctagacagagataacttggaaagaacaatctgtttatcagacataaccttctggaatctcattgccctaatagaggtagaaggctatagttcaagggattttatgtattatgttagagatccaggagctgcggtgtcaggaatggaagaattaactgatgatgacaaggtggaagaaatgttggatcacatagctagtaaaggaaagaatgttgttaacattacagttatgagaagtgatgcacctagaccagttgatttgaacattggtcatgcttatgaagagcaagttcctttgtcagaaatacgtgtaccagttgtctatgaggtagacaattcaggagttcttttccccagtccagtgaaatga

SEQ ID NO: 943 - DNA, 2238 bp, Triticum aestivum
  source 1..2238: mol_type = genomic DNA
atggaccggacatcgaatttcatgcctactcctgatcaggatgtcctggatatccagcccctgaggactttggctcccatgttccctgcgcctctgggggtcaacacgtttaacgtgcccaacaccaccccaccattgatatttgtcacttcagctgggcagtttccagggggggttggtgctccgggccatcctgctttcaggtcattcgccgccgctttcggtgctcaagatgcttatggagggcagcctgcctcttctggtggccagcatgacggtggagggcatcctgcctcttctcgtcgccaggatggtggtggaggccaggctaccacctttgctgataagtacgctgctaatggaggccagactgctgctaatggggctacaaaccttggcgccagcgctgacagcccaattgatgtcatccctatatcagcttacaggccgacaccgccacctgttataccactggacgacgatgacgatgacaatgagcatttcactggcaaccagacatcagcatctgggcggaagatcaagaggccgtcccacctaagtggatataagatgagcggcggtttgggcagtgatgacaacaatggtgtgaagaccaaacgcaacaagacctctcacaggaaggctggtgctgacaatgagtttacctcggtgcccctttcatccagcaatcccagggaggctgtggaagaggttctcatgaacttcgaggccctgcggcgtagacatcttcaattggatgcggcacaagagagtaccaaacgcccagaccttaagattggtgccgtgatgatggccaataatcttagggctaacatcaggaagaggattggagttgttcctggagttgaaataggggatattttctacttcaggatggagctatgcattattggcttgcatgctcctaccatggctggaattgattatatgacccacacctttggtgataaggatgatgattctgtagcagtatgtattgtcgctgcaggtgtttatgagaatgaagatgatgctacagacacactagtctacagcggttcaggaggtagtagcaagaacaatgaggagatgcatgaccagaagcttgagaggggtaaccttgctcttcagatgagcctgtcgagaaagaatgtgatccgggttgtacggggatttaaagatccaggtagcttgggtgggaaggtttatatgtatgatggcctctataagatccatgagtcctggaaggagagaacaaagactgggatcaattgcttcaagtacaagctgctgagggagccaggacaacccgagggaatgtcaatctggaagatgtcccggaaatgggtagagaatccagcaactagaggcagagttctacaccctgatctatcatctggtactgaaaatcttccggtgtgtcttgtcaatgatgttgacagtgagaaaggaccaggccttttcacctatattacccaggtcaaatacccaaagccactaagttctatgaaaccattacagggttgttcatgcctcaatgcttgtctgcccagtgataccgattgtgattgtgcagagtttaatggaggtaatttaccttatagttcaacaggattgcttgtatgccgcaagaataggctatatgaatgtggtgaatcttgccagtgttcagttaactgccgtaacagggtgacacagaaggggattagggttcactttgagatctttaggacaggaaatcgaggctggggtcttcgttcatgggatcctatacgggctggctcatttatctgcgagtatgttggcgaggttattgatgagagtaaaaggaatttggatggtgaagatgaagatgattacctttttcagactgtgcgtcctggtgagaagacattaaaatgggattatgtacctgaactgatgggggagcaaatcacaaataattcagctgatacttttgagccactgcccatcaagataagcgcaaagaaaatgggaaacatctcacgtttcatgaatcatagttgctcccctaacgccttctggcagccagttcagtttgaccatggagatgacggtcacccacatatcatgttctttgcgctaaagcacatccctcccatgacagagctgacttatgactatggtgagattggagctgattctggtggtataggttctcctggagctaagagatgcctttgtggatcctcaaattgccggggctatttctgctga

SEQ ID NO: 944 - DNA, 915 bp, Triticum aestivum
  source 1..915: mol_type = genomic DNA
atgggcaaccaagaacttcttgagtatttcagtgattatgctgcgaccaaagcacgccatgcatatggtccaggtgggcaccgtggcatgagtgtgctaatatttgaaagctctgctgtgggctatatggaggcagaacgtcttcataagcattttattgatcaaagaacagacagggacacttggcagaatcgcagggttcctttcttacctggtgggaagagacaattatacggtttcctagccagaaaggaagacatggagactttcaatagacactgccaagggaaaagccgcctgaaatacgagatgagatctcataatgagatggtagtggcccagatgaagcaaatgagcgaagataatcaacaactcaattatctgaagaacaaggtggttaagacagagcagcgctctaaagttgtagaagaaaccctgggtgttattacgcagaaacttcgagagactatggaagagaatatattcgtcaggagtaaagctaaagagaagcactctgagtatgaggaagagatgaaatcccaggaaaaattcttccatgatcagatagagaacattcacaaggccacagaagacaaggaaagcgagtttgagagattgctgcaggaggagcgtgcaaaggctagacagtgtgatgtggattctgggactactgaaaatcgcaggctaaggaaggaacaggtacagcggttcatagagtgccaggttaaggacgtgcaggagtttgaggctgaaagggacgaaatgataaaagcgcacgaggagaagaaggtgcagctgaagaaagagtacatggcaaaggaggtggagctcgagaaggagtttgatgctgctctcaccggtttgatggagaaacataggccaggcaccttccaggcctccagctccagcccgtga

SEQ ID NO: 945 - DNA, 3270 bp, Triticum urartu
  source 1..3270: mol_type = genomic DNA
atggcgacggcggtgtcagcgcccgtcttcacggcgacggtgcgggtttccaatatcccgccctccgccgtcgctaaggagctcctagcattcttcgattccgccgtcgccgctgccggcgaagcctacgcctgcgagatcgccgccgcccgacgcggctgcgtccgcgtggaggtcatcccggggaagcggcgcatagacctgtacctcaatcacgattcccagaggtacaggcttgaggtgtacttcgaggacatcaggaactgtctccagtgcagcttcgatggggccggcgtcatcttgcttcaggacctgtcggaaggcgtcactcctctgaagatcaggttattcctctccgtccagatcgaccacgctgctgtggtgaacacttccatgatcacggtgttggttctgaatgttcagaggctgcagcagctcatgtatgcaccaaggatatgcacaacaatttctgggcctgcagtttattcaaggttctcagatgaccgctttcatgcatgcaaggaggatgcaaaatttacctgggtcagagcactagattttacacgcaaccactcttttgggaagtgttcaactcttgccctcgtacttgatgaaggtgcaccggtgtcatttattctcaacagcttgcctatgtcaggagaattaggggaattggtcatttcttcaatggaattttttggcccgtcgtccaaagtcgttccccttgttgactgcccaagtggttgttcagtgtcatatgaagttctttttcgtctcaattctcttgttcacatggggaagatagtttccaaggatgttaatgccgatctgtttaaagctcttgaagaaataccagttcatatttcaaggaggatttttgagaaaatgaacaagttagactttacatgctatgaacctttgcaattcatccagcaggaggctcatagcaggaagaggagccatgatggtttgctttccagtaagactgaaggtgaaggaaagttaatgatgtgttacagaattcacatcactccatccaaaatatactgcttgggacctgaggaagaggtttcaaattatgtggttaagcatcacaaacagtatgcttctgactttgctagagttacttttgtagacgaagactggagtaagctttttccagatgctatctcagctagaactggacgagggttcttttctcaccccttgaaaactggcctatatcatcgtattttatccatcttgaaagaaggattttccattggtccaaagaagtatgaattcctggccttctcagcaagtcaacttcgtggaagttctgtttggatgtttgcctctaatgattccctgaaggccgaggatataagcaggtggatgggcaactttgaagatattcgttcagtatctaagtgtgcggctagaatgggccaactgttcagctcctccagacaaacacttgaaatcctaccacgggacgtagaagagattccagatatcgaagtcataactgatggcagtaaatatatattttctgatggtatcgggaagatctctgagagacttgctaaagaaatggcttgccgaattggattagactataccaaccctccttcagcttttcaaataaggtatggtggctacaaaggagttgttgctgtggaccctgattcctttcgtaatctttctctgcgacctagtatgaagaaattcgaatcaaagagcagaatgtttaacattacaagtaccagcaaatcccaaccatgctatatgaatcgtgaagttatctctctcctttcaactttggggataagagatgagatatttgagtcgatgcaacagaatgatatgcgtgaattagatgaaatgctgaccaacagagaagctgctctctctgttctggggaaaattggtagtgcagaaacaaagacagcatcgaaaattttactgcaaggctatgaaccaagtttagagccttacctgttgatgattcttaaggcccatcaggataataggctgactgacataagaactagatgtaagattcatgttccaaaaggccgtgttcttattggttgtttggatgaaacaggtgaattagaatacggtcaagtgtacatcagaattacaaagaacagcaaagagcagaaggataattgtcagccatattttgctgaagataatggaaaagagaaaacagcagttgttgttggaaaagttgcagtatcaaaaaatccttgtctccatcctggtgacatcagagtacttgaagctgtctatgaccatggtttgtacgctaagaacctggttgattgtgttgtcttcccccaaagaggagaaaggcctcatccaaatgaatgctccgggggcgatttggacggtgacctctattttatcacttgggatgagaaactgattccagagaaggttgattcacctatggactacactgcagcaaggccacgcataatggatcatgttgttacacttgaggaaattcagaagtactttgtggattacatgataaatgactcgctcggtgcaatctcaactgctcacttggtccacgcggatcgtcatccaatgaaagcccggagccctgagtgcctccagctagctgctttgcattcgatggcggtcgactttgccaagacaggagctccagctgaaatgccccggtcactgagagcaaaggagtaccccgacttcatggaacggtgggacaaaccaacgtacatctccaacggcgctctcggcaagctctaccgagcggctgcgagccgtatgcagagcgctcctgccccctcgtcctcggctcaatctagccccgcgttcgatcctgacctagaggtccctggcttggaggaattcctggcatccgcggaggagttctacgacctgtacgcggagaagctgagcaccctgatgagctactatggtgcggagcatgaggacgagatcctgacgggcaacatccggaataggctcctgtacctgaagaaggacaacaagaggtacttcgagatgaaggaccgcatcatcgactcggtggagggcctgcacaaggaggtgcagggttggttcaggagccgcccaaaggcagaggcgtcaaggtgggcgtcggcgtggtaccgcgtgacttatcacccggagcaccgacggccgggaaagaagcagttctggagcttcccgtggattgtctgcgacgagctgctgaagatcaaggagtccagtatgcggcgcaggcagcaggtggacgacgcggcggcctga

SEQ ID NO: 946 - DNA, 1890 bp, Triticum aestivum
  source 1..1890: mol_type = genomic DNA
atggagtcgtcacgcggcatcctcatccccggcacgccgccgctgccctacgcgtacgagccgctgccctcctcctccgccgacgccaacggccaggaggaccggcggatcaccggcggcgtgaggtggcgcgcgtgggccgccgtgctggccgtgggggcgctcgtcgtcgccgccgcggtctttggggccagcagggtcgaccgggacgcggtggcctcctccgtaccggctacagcggaacatggcgtgctggagaaggcgtccgggccatactccgccagcggcggcttcccgtggagcaacgccatgctgcagtggcagcgcaccggctaccatttccagccggagaagaactaccagaacgatcccaacggtccggtgtactacaaaggatggtaccacttcttctaccagcacaatccggggggcaccgggtggggcaacatctcatggggccatgccgtgtcgcgggacatggtccactggcgtcacctaccgctcgccatggtgcccgagcactggtacgacatcgagggtgtcctcaccggatccatcaccgtgctccccgatagcagggtcatcctgctctacacagggaacaccgagacgttcgcgcaggtgacctgcctcgcggaggccgccgacccaagcgaccccctcctccgcgagtgggtcaagcaccccgccaaccccgtcgtgtacccgccccctggcatcggcatgaaggactaccgcgaccccaccacggcgtggttcgacaactccgacaacacgtggcgcatcatcattggctccaagaatgataccgaccactccggcattgtattcacgtacaagaccaaggacttcgtcagctacgagatgataccggggtacctgtaccgcggccccgccggcaccggcatgtacgagtgcatcgacctgtacgccgttggcggtggccgcaaggccagcgacatgtacaactcgaccgccaaggatgtgttgtacgtgctcaaggagagcagcgacgatgaccggcgcgactattacgcgctcgggaggttcgacgcagcggccaacacatggacgccgatcgacaccgagcaggaactcggcgtcgcgctgcggtacgactatggcaggtacgacgcgtccaagtccttctacgaccccgtgaagcagcggcggatcgtctgggggtacgttgtcgagaccgactcctggagcgccgacgccgccaaggggtgggccaacctccagtcgattccgagaacggtggagcttgacgagaagacccggacgaacctcatccaatggccggtggaggagctcgataccctccgcatcaacaccaccgatttcagcggtatcactgtcggtgccggatccgtcgtctccctccccctccaccagacctcccaactcgacatcgaggcatccttccgcatcaacgcctccgccattgaggccctcaatgaggttgacgtcggctacaactgcaccctgaccagcggcgccgccacccgcggcgcgctcggccccttcggcattcttgtcctcgccaatgtcgccctgacagaacggacggcggtgtacttttatgtgtccaagggactggatggtggtcttcggacgcacttctgccacgatgagttgcggtcgacacatgctaccgatgtggcgaaggaggtagttggtagcacggtaccggtgctcgacggcgaggatttttccgttagggtgctcgtggaccactccatcgtgcagagcttcgtgatgggcgggaggatgacggcgacatcaagggcctacccgacggaggccatttacgcggcggcgggggtctacctgttcaacaatgccaccggcgccagcatcaccgctgagaagctcgtcgtgcacgac

SEQ ID NO: 947 - DNA, 907 bp, Triticum aestivum
  source 1..907: mol_type = genomic DNA
gaccgcatccgaatgaatgttcagggagtgatctggatggggacatatactttgtttcatgggacccagatctcattccaactcgtatggtggcgcctatggactatactcctgcaccaacagaaacattagatcatgatgttatgattgaggtattttatgtttgtagcccagattgttcatttttcatgccattcaccttcacgataacgtctgtacacctgttggctgttgccatgaactgtcatttagtcgtgcttctgattgtgaatttcctttcgattctggttcttgcatttctgaagagttgactacttaaacctgttttctgagtctgcagggttttaatttatttgtttgtacttccgccagtccaaaatgtagatctttttatagttgagcacatgaactaggggtggtggtaacatgccaatgttacccttcattcatttcatgtgctctctgttccttccaatagagtagtgctacagtataggctcaattcttgatgaaactaatgtgggactagattggaacacatgagaagtgtattgcgaatgtagaaggacctacattttggatggaattgaaaagactagaaggacctacgttttggatccgaggaagtaggaagataaatctgtttcttctcattgtctattacttgcaaggaaattccaagcatcttgtaaaacaaatctgacaccctgctttggaaccactctaatatcatgcaggaagtacatgagtatttcacaaattacatagttaacgagagtctgggaatcattgccaacgcgcacgtagtctttgcggatagggaaatcttgaaggctgaaagtacaccatgcattaagctggcagagctcttctccattgctgttgatttcccaaaaaccggagtccc

SEQ ID NO: 948 - DNA, 3231 bp, Triticum aestivum
  source 1..3231: mol_type = genomic DNA
atgctccggaatggaaacgagggaatgtccacaatacccggatttagtcagatccaattcgagggattttgtaggttcattaatcaagccttggcagaagaacttgacaagtttccaacaattaaagatccagatcacgaaattgcatttcaattatttgcgaaaggatatcaattgctagaaccctcgataaaagaaagagatgctgtgtatgaatcactcacctattcttccgaattatatgtatctgcgagattaatttttggtttcgatgtgcaaaagcaaaccatttctatcggaaacattcctataatgaattccttaggaacctttattataaatggaatataccgaattgtgatcaatcaaatattgctaagtcctggtatttactaccgctcggaattagatcataagggaatttctatctacactgggactataatatcagattggggagggagatcggaattagcaattgataaaaaagaaaggatatgggctcgcgtgagtagaaaacaaaagatatctattctagttctatcatcagctatgggttcgaatctaagagaaattctagataatgtttcctaccctgaaattttcttgtctttcccgaatgctaaggagaagaagaggattgagtcaaaagaaaaagctattttggagttttatcaacaatttgcttgtgtaggtggggacctggtattttcggagtccttatgcgaggaattacaaaagaaattttttcaacaaaaatgtgaattaggaaggattggtcgacgaaatatgaatcggagacttaatcttgatatacctcagaacaatacattcttgttaccacgagatgtattggccgctacggatcatttgattggaatgaaatttggaacgggtatacttgacgatgacgatatgaatcacttgaaaaataaacgtattcgttcggttgcggatctgttacaagatcaattcggattggctcttggtcgtttacaacatgcagttcaaaaaactattcgtagagtattcatacgtcaatcgaaaccgactccccaaactttggtaactccaacttcaacttcaattttattaataactacttatgagaccttttttggcacatacccgttatctcaagtttttgatcaaacgaatccattgacacaaactgttcatgggcgaaaagtgagttgtttaggtcctggagggttgacggggagaaccgcaagttttcggagccgagatattcatccgagtcactatgggcgtatttgtccaatcgacacgtctgaaggaatcaatgttggacttactggatccttagcaattcatgcgagaattgatcacttgtggggatccatagagagtccgttttatgaaatatctgctgagaaagcaaaagaaaaaaaagagagacaggtggtttatctatcaccaaatagagatgaatattatatgatagcagcaggaaattctttgtccttgaatcaaggtattcaggaagaacaggttgttccggctagataccgtcaagaattcttgactattgcatgggaacagattcatgttagaagtatttttcctttccaatatttttctattgggggttctctcattccttttattgagcacaatgatgcgaatcgggctttaatgagttctaatatgcagcgccaagcagttccgctttctcggtccgagaaatgcattgttggaactggattggaacgccaaacagctctagattcgagggtttccattatagccgaacgcgagggaaagatcatttctactgatagtcataagatacttttatcaagtagtgggaagactataagtattcctttagttaaccaccgtcgctctaacaaaaatacttgtatgcaccaaaaacctcgggttccacggggtaaatccattaaaaaaggacaaattttagcagaaggagctgctacagttgggggcgaacttgctttaggaaaaaacgtattagtagcttatatgccatgggaaggttacaattttgaagacgcagtactaattagcgaacgtttggtatatgaagatatttatacctcttttcacatccggaaatatgaaattcagacggatacgacaagccagggctccgctgaaaaaatcactaaagaaataccacatctagaagaacatttactccgcaatttggacagaaatggagttgttaggttgggatcctgggtagaaactggtgatattttagtaggtaaattaacgcctcagatagcgagcgaatcatcttatatcgcggaagctggattattacgggccatatttggccttgaggtttccacttcaaaagaaacttctctgaaattacctataggtggaagagggcgcgttatcgatgtgaaatggatccaaagggacccgctcgacataatggttcgtgtatatattttacagaaacgtgaaatcaaagttggggataaagtagccggaagacatgggaataaagggatcatttccaaaattttgcctaggcaagatatgccctatttgcaagatggaacacccgttgatatggtcttcaatcccttaggagtaccctcccgaatgaatgtgggacaaatatttgaaagctcactcggattagcgggggatctgctaaagaaacattatagaatagcaccctttgatgagagatatgagcaagaggcttcaagaaaacttgtgttttcagaattatatgaagccagtaaagaaacaaaaaatccatgggtatttgaacccgagtacccgggaaaaagcagaatatttgatggaagaacaggcgacccctttgagcaacctgttctaatagggaagtcctatatcttaaaattaattcatcaagttgatgagaaaattcatgggcgttctactgggccctactcacttgttacacaacaaccggttagaggaagagccaagcaagggggacaacgagtaggagaaatggaagtttgggctttagaaggatttggtgttgctcatattttacaagagatacttacttataaatctgaccatcttatagctcgccaagaaatacttaatgctacgatctggggaaaaagaatacctaatcatgaggatcctccagaatcttttcgagtgctcgttcgagaactacgatctttggctctagaactgaatcatttccttgtatctgaaaagaacttccaggttaatagggaggaagtttga

SEQ ID NO: 949 - DNA, 3507 bp, Triticum urartu
  source 1..3507: mol_type = genomic DNA
atggagatggccttatgccacgtcagcccgatacaattgggggcccctgccgttaacctaccgcccatgggctcgtcggtagaaagagggttagattccgaaataattttgaataagggtcaaatccggctaaacttcagcaaaaaggcgggtcgatgggctgcccaggctttgttaggagcagcttttgtctgcttgttcaggcatgccaatgccgtgccatggcaggtcaggtcagattatcaagcgcaaacgcgcgtgttcttcttcttcgtggtgccgtttgatgaggtcatgagcttgagcgaggagggtggcgggacgacggacaagatgggcaagcaggacaacgacgtctcccgcgccgtcgtggaggacgacaccgcgctcctcctcgcggcggtggacagcatcaagaaggcggcgctgggccggctgcgcaacggctccgacgccgccaggatcctcgaccaggacatgtccaacaggctcctccacctcgcctgcaggcacgacgccgccgagtgcgccaggctcctcctcgacggggagtacgggatcacgccggcctccgtcgacgccagggacccgctcacgcggacgcccctccacgtcgctgccgaggggcactccaagaggtgcatccagctgctcctctccaggaacgcccggacggacgtcaggctgctcgatggcacacgcctagtcgcgctcgaggtcgcgctcatgagcagaagggttcaagttgattggtcacaggacaactcggtcgaggatcttcttgcttatctgcaacaaaaggatctgaacgcggtgaggcttctggcagagaagaccagggaggttggggaggtggcttacagatacgccatggaggggcgtgtcgctgcactcgcaatgctgctcctggtgactgaggaaaggatatcggcgatggtgagcgtggtgattgatggcgtcaggacaaagagatcaatctacaactctgttgtggacgaggttctgtcgattggagaggcttcagctagagaaggcaatgaaatgaggaggaaagccttgctctgtgagattcagctgcttaaccaatttggggccacagtgtggagggaccgaaaagttgacaggagaagcttgccccctctacttagggctgcaaaggccggagatatgaatgtcacaaagatgcttctgatgggggatgttgatgtcaatgaaaccgaccccgaaggaaacacagcacttcactggtgccttagtagtagctcaagcacacaggagccaaggattgtgtggctcctgcagaagaatggtgccagagttttccaggggaacaaactaggtctcacaccagtgcacagcgctgcagctaagggcaattacaaggctcttcagtcacttctgcttcatgcacaagattgcgttgatataccttccaagaccaaagaaaccccattattccttgcagtgaaaaatggttctttgagctgtgtacgacttcttttgcgttatggggctaaccccaaagcccagaacctacgaaagcaaagaccaatagacgtggcgacatcccaggacatgcggttccttctcaactccgcaaatgttgtaccaatgaaccatggctcaatggaaaagaaccatgcaatgaaaaaagaaaggcacaaagagcttctggatgatgatttcgatgattgtgacaacgacgattattatgaaagctatgttgtgccaaaggcgtcagtaggtcaccgggattttcgggttaaaagtaagggccacagtaccccgaaagaaggccccaaattatctcggcataatgatcattgggagaagcatgactacactcgcaaaatctttgttgggggtctcccgctttcagtagacgatgcgtaccttagcaaattcttcagtactgaattcggacctgtggaggaagcaatagtcattaccttaaaaatagacgagaggatacagtcccgaggctttggctttgtaaaattcaaaagagagaaggatatgattagtgcaaaggaagctcatcatgtctatgtgcttgggaagagagtggagataaaggatgctgttgctagaccgtccctgcctgaactcgaaagagcaacttccttcaggcaccatgtacgtgagtccccaagagtgactcatagtgagctggaggatgaacaagctgagcaatataactttggaaaacggcggccaatgccagagaagcacctcccgtcttggttcttcatattcaggaggtggttgccaggatttctcatggaagcaaccgagcgatatggggagaagtacccattatgctctgtgaagactgatttcagatcatgttgcagaatggagcttgatcattctgcccttggctatcctaagctaagcgatttcatgcgctccctccctggcatatgcaggatgcgtgtagtccctgtaggaaatggccctgcaacacatatggtccttctgccacccctctcaaggccaaagtatgtacccttgctggagccttactcgtttgatcatgacgagctcccagaatcagtgtcagatcatcactctccaagatcaccacttaccgccaatatcactgagaatgctccttatagcactgacagtccacagggtgatgcatgcagcgagaccaatgtccagagccagcatgatgatgagtgtagcagaagcaatggcgaaagcctgccggatggtgattccacctccaattgtagcttacttgatgaggttactgtgagcacaccaaagtctgatttgatcgagtcacctgcaagaaagcctgatttgatcgtgtctggagctcttcctggaaaagccgaacaaggaccgttaaggaggcctgatttggtcgagtctgcacctacaaagaaactcgatttgattgagtccagtcctcctccttctcctcctagcaaggctgatttggttcagcctgggcctgcagggaagcttcatttggttgagtccagtcctcctaggaaggctgaattggttgagccgggaccagcaaggaagattgatttgaatcaacccagaccaacaacacgctttgttgatcgtcctgttgaaaggccagcaatcactccaagcagctgcgagaatgaaatgagattctccttcttccactcacagtgggacaagtacctaactccacatgccaagagtgactactgcatcatatgccgctcctgtgaggccgcgatggagcttgtcccgtgcctccataagatatgtgttgcctgcatgatgaggtgcaatgtcagggcatgcatgacctgtggcactgctggagtcatggagtgcgtctcggatcaaaagtgccagttgatggttgtctgcagtggagctgatgcagttgtgagatgctccccctgcatgcacaccatagcttgccgaggctgcctcctggcctcggtgacactgctcaagaagtgcactgtctgtgactgcatgattgagcacttcaagtttggtccataa

SEQ ID NO: 950 - DNA, 2052 bp, Triticum aestivum
  source 1..2052: mol_type = genomic DNA
atgattgaccaatataaacatcaacaacttcaaattggactcgtttcccctcaacaaataaaggcttgggctaacaaaaacctacctaatggagaagtcgttggcgaagtcacaaggccctctacttttcattataaaaccgataaaccagaaaaagatggattgttttgcgaaagaatctttggacccataaaaagcgggatttgcgcttgtggcaattctcgagcgagcggagctgaaaacgaagacgaaagattttgccaaaaatgcggggtagaatttgtggattctcggatacgaagatatcaaatgggatacatcaaactcgcatgtcccgtgactcatgtgtggtatttgaaaggtcttcctagttatatcgcgaatcttttagataaacctcttaagaagttggagggcctagtatacggcgatttctcttttgctaggcccagcactaaaaaacccacttttttacgattacgaggtttattcgaagaggaaattgcatcctgtaaccacagcatttctccctttttttctaccccaggctttgcaacatttcgaaatcgggaaattgcgacaggagcaggtgctattagagaacaattagcagatttggatttgcgaattattatagagaattctttggtcgaatggaaggaattagaagacgaggggtatagtggagatgagtgggaagatagaaaaagacgaataagaaaagtttttttgattagacgcatgcaattggcgaaacattttattcaaacaaatgtagaaccagaatggatggttttgtgcttattaccggttcttcctcccgaattgagacctattgtttataggtctggagataaagtagtgacttcagacattaatgaactttataagagagttatccgtcggaacaacaatcttgcctatctattaaaaagaagtgaattagcgccagcagatttagtaatgtgccaggaaaaattggtacaagaagccgtggatacacttcttgatagtgggtcccgcgggcaaccgacgagggatggtcacaataaagtatacaaatcactttcagatgtaattgaaggtaaagagggaaggtttcgcgagactctgcttgggaaacgggtcgattactcggggcgttctgtcattgttgtgggtccttcgctttcattacatcaatgtggattacctctagagatagcaataaagctttttcagctatttgtaattcgcgatttaatcacgaaacgcgccacttctaatgtaaggattgctaaaaggaaaatttgggaaaaagaacccattgtatgggaaatacttcaagaagttatgcggggacatcctgtactgttaaatagagcacctaccctgcatagattaggcatacaggcctttcaacccactttagtagaggggcgtactatttctttacacccattagtgtgtaagggtttcaatgcggactttgatggagatcaaatggctgttcatctacctttatccttggaagctcaggcagaagcccgtttacttatgttttctcatatgaatctcttatctcccgctattggggatcctatttgcgtaccaacccaagacatgcttatcgggctttatgtattaacgattggaaagcgtcgaggtatttgtgcaaatagatataatagttgcagaaactatccaaatctaaaagtaaattacaataataataataattctaaatataggaaagataaagaaccccatttttctagttcttatgatgcactgggagcttatagacaaaaactaatcagtttagatagtcccttgtggctacgatggaacctggatcaacgcgtcattgggtcaagagaagttccgattgaagttcaatatgaatctttggggacttatcatgagatttatgcccactatctaataatgggaaatagaaaaaaagaaattcgttcgatatacattcgaaccactcttggtcatatttctttttatagagaaatagaggaagccatacaaggatttagtcaggcctattcatacactacctaa

SEQ ID NO: 951 - DNA, 4209 bp, Triticum urartu
  source 1..4209: mol_type = genomic DNA
atggagcaagcgtgtcggggtggagaaagaaggttcatcaatgcccattttagagttttgacttgcgacaccgatactagagccaaaaatacggagttcaagcgtcataatgttgatgatctcatgatggaggagccaaatgctgaaatgggaatgccaaccggggagctgaaaggcatcacattctatctcatgaccaatacagagatggaaaagtcaagcagcgtgagcattgtagaaccatctgatgtcagtagtgccaagttgggactaccaaatggggcaccacagtgtgagacttgcggagcgcagagtgtgcgtgaatgtgatggtcattctggcgtgattaagctgccagcaactgtgttcaacccgcatctattcgaggaagttgttcagttactgaatcagatatgtcctggctgccacactccaaagcagaacagagattcaaagaggtcggatggggcaacaagtcaagcaacttgcaagtattgctcaaaggatggcactaaacaataccccgatgtaatctttaagacactgacaagcccaagaatgacactgtccaaggctaaacttcaacgggatcctagcgttatggacaaaatttcgcttactgcagaagttgctgacagagtgactgattcagctgaagttcttcccctggactattgggatttcgtacctcatcaccacccccctcaatcaaatatgaccaagatattactgtctccataccaagcctctcacatattgaaacaacttgatcctgagctatttagccggtttgcttcaaggccggagctaattttcctgtcgtgtttgccggtcactcctaacttccatcgcgtggcggagttgccctatgggttttcagatggccctcgcctagcttatttacactctaaaaagacagataaggagtcatcaacagacacacatggaatgaaatggttgaaggatgccattctcagcaaacggtccgataatgcttttcggggtactatggtcggtgatccgaagattagattgcatgaaattggcatccctgtggatttagcttcgaacttgttagtttctgagcatgtgaactcctacaactttgacagcataaattcgaagtgcaactgttaccttcttgccaatgaaaaactagtcattaagcgcagtggaaagacaattattgttcggaagccaaatcagctggtaattggtgacactgtgcacaggctgttgcaggatggtgaccttattcttatcaataggccaccgtcaatacatcaacactccgttattggactctctgcaaaattactcccagttcagtcggtactttcaatcaacccactctgttgtgcaccactcgcgggagattttgatggggactgtttgcatggatatgtcccacagtccatacagtcaagagttgagcttgaggagctagttagtttgagccaccaactattgaacgcgcaagatgggcgaagtttggtgtcattaacacatgactctctagctgcagcatatctgttaacaagctcagaggttttactaaagaaaactgaagttcagcaatttcaaatgttattatgccatccactctcgccgacaccagggccagcaataatgaaatctatacactctcatggtccactgtggaccggtaagcagttgttcagcatgctgcttccgtctgatatgagtttcagcattgagcctaagaatagcatatctggccttttttccgtcatgttcaaacaatatggcgacaaggctcttgagttactctcttctgctcaggatgtactatgtgagtttttaaccatgagaggtttaagtgtcagtctttcggatatctatctgttcccagaccatgactcgaggagaaaactagctgatggagttaatctggcattggatgatgctgaagaggcttttcgtattaaacagatattgctaagtccagattccatatcgattctgaaatgttatgacgactgtgctgatttatcacaatcttatgaacagtccaatttcattcagagcaatctgccaattataaaatcttcaatcatggcgtttaagagtgtattcagtgatcttcagaagatggttcaacagcacacagccaaaaataattcaatgatgatgatgactaatgcaggaagtaagggtagcatgttgaagtttgtgcaacaaactgcatgcgtcggtcttcaacttccagcaagcagattcccctttagaattccatcggaactctcatgtgccagctggaataggcataaatctgagggcacgggtgaatgcttgggaggccaaaacttgtatgctgtgatcaggaattcctttgctggtggtttaaatccattggagtgtcttcttcattcgatatctggcagggcaaacttcttcagtgagaatgcagatgttcccgggactttaacaagaaaactaatgtatcacctgagggatttatatgttgcttatgatgggactgttagaagttcttacgggcagcagataatgcagttcacttatgatactgctgaagacatgtgcagtgatcgcaatgtggaaggtgaacttggtgcccctgttggttcatgggctgcttgttccatttcagaagctgcatatggagctttggatcacccagtgaacagcttggaggaatctcctctcatgaatttgcaggatgtattgaagtgccagaagggtggtacttctatggatcatgttggtttgcttttcctgtcaaagaatctaaaaaaatatagatatggtttggagtatgcatcgctagaagttaaggatcatctcgagccagtgaacttctctgatttggttgacaccgtcatgatcctatatgggggatgtggtatagagtcaacaaaaggaagcgcatggattactcattttcatctaagccaggaaatgatgacgaaaaaaagattgggactaacacttgttgtggaagagcttacagaacaatacaatgccaaaagagacaagttaaacttccctaaagtttatatttcaaagggggtaaataccgctgggaagatggtcaggcggctgtttgggagagggattagattagggattgcgaggatgagcaaatgttctgctgacaatgagtgcggtaacaggcagacttgttgcatcactgtggtaacacaggatgattcaaactctatgtctcaattggacactatcaagaaaagggtgattccaaacctcctggccttactagtgaaaggatttttggaatttaagaaagttgagatccagtgtcaagaggacagtgaacttgttgtgaaagttgttatgtctgaggagcattgcaagagtgttaagttttgggctactctacaaaagtcttgcatagcaattatggagttgattgactgggagcggagccggccagggagcgtatatgatattttctgctcatatggcatagactcagcgtggaaatactttgttgaatctttaagatcaaaaactgatgatattggaaggaatattcgccgcgaacacttgctggtcgtggcaaattgcctgtctaggcctgcacatacttttataaatgctgcaaagcagtcttcagtggacaatctctgtggtactgtagatgcaatggcctggggcaaggagccttctactgggacatcgggtcctttcaagattatttattctgggaaggcgcatgcacccataccaaatgagaacatctatgacttcctaaatagccctgaagttcggcaagcgccgggcgaagctttcttgaatggtagcaccatatctgtggagcaagattttcttgttgctgcagttggtatatgggacagcattattgatatgcgcacttgcttgcagaacatgctacgagagtaccaattaaatgaatgtgttggggagctagataaatcacgtgtaatcgaggccctgagatttcatcccagagggcgtgaaaagattggtgctggaatagaagatataaagattggacatcatcctagtcacccaggaacaaggtgcttcattatggtgaaagcttatgttcggatccagaatgacgatggcggcaccctcgacgccatccctctgtttggagcatcgtatttggagacatggcttggaggttctaagttgcgttcctatggtgcgcgctgctgttatggaccgttctcaagggtctag

SEQ ID NO: 952 - DNA, 1581 bp, Triticum urartu
  source 1..1581: mol_type = genomic DNA
atggccggcggcgcggttgtgaacaccggcggggggaaggactaccccggcaagctcaccatgttcgtgctcttcgcctgcatcgtcgccgccaccggcggcctcatcttcggatacgacataggcatctccggtggcgtgacctcgatgaaccccttcctgatgaagttcttcccgggcgtgtaccaccaggagcaggaggcggagcggaaccagagcaaccagtactgcaagttcgacagccagctgctcaccatgttcacctcctcgctctacctcgccgcgctcgtcgcctccttcttcgccgccaccgtcacccgcgtcgccggccgcaagtggtccatgttcgccggcggggtcaccttcctcgtcggcgccgcgctcaacggcgccgccaagaacgtcctcatgctcatcctcggccgcgtcctgctcggcatcggggtcggcttcgccaaccagtcggtgccggtgtacctgtcggagatggcgccggcgaggctgcgggggatgctcaacatcgggttccagctgatggtcaccatcggcatcctgtgcgcgaacctgatcaactacgggacggccaagatcaagggcgggtggggctggcgcgtgagcctcgcgctggccgcggtgcccgccggaatcatcgccatcggcgcgctcttcctccccgacacccccaactccctcatcgaccgcggctacacggaggacgccaagaagatgctccggcgcgtgcgcggcacggacgacgtggaggaggagtacagcgacctggtggccgccagcgaggagtccaagctggtgagccacccgtggcgcaacatcctccagcgccgctaccggccgcagctcaccttcgcgatcgccatccccttcttccagcagctcacgggcatcaacgtgatcatgttctacgcgcccgtgctgttcaagacgctggggttcgcggacgacgcgtccctcatgtccgccgtcatcaccggcctcgtcaacgtcttcgccaccttcgtgtccatcgtgaccgtggaccggctgggccggcgcaagctgttcctgcagggcggcacccagatgctggcctgccagatcgtggtgggcagcctgatcggcgccaagttcgggttcaccggcgtggccgacatccccaaggggtacgcggcgttcgtggtgctcttcatctgcgcgtacgtggccgggttcgcgtggtcctggggcccgctggggtggctcgtccccagcgagatcttcccgctggagatcaggtcggcggggcagagcatcacggtgtcgatgaacatgctgtgcaccttcatcatcgcgcaggcgttcctccccatgctctgccgcttcaagttcatgctcttcttcttcttcggcgcgtgggtggtggtcatgaccctcttcgtcgccttcttcctgccggagaccaagaacgtgcccatcgaggagatggtgctcgtgtggaaggcgcactggtactggggccgcttcatccgcgacgaggacgtgcacgtcggcggcgccgacgtcgagatgcgctccaacggcaagctccaggctgccaagctcccgtga

SEQ ID NO: 953 - DNA, 4878 bp, Triticum urartu
  source 1..4878: mol_type = genomic DNA
atggcgaccgttccctctgtaaccgcgcctgcccctatttgggccatttccgccgtatttcctcccgtgtatcatactcatctcttcggatgtgcgtcgtgggggcttagcttgctgggggttaggagactattttcagaaatccgttggagtacttgcatacttagtggatccgtgcttggtggcattgagattcaccgcaaatcttctgtagccttaatttgccttgactgcctgcagctggtgatttttgttcttgagtatcctagggatatatcaaatatggtgaaaagtccacgttctccagttaccacaggaacaaaaaggtgcagagcaaagccacaaaagaagggtgaagaattcactgcacaaggaaaattggtggatgggcctcaggatgcaacaaatggtgttgaaaagggtgctggttctgctactcacaagaggccaaggagggcagcagcctgttctgattttaaggagaaatctgtacgtttatcagaaaaaacttctgttgtcaagatcaagaaaaatcggatggaagaggaagaaatagatgcaatcaacctgacaaaattagggccagaagattcgccgccttgccggaagttgattgatttcatcttgcatgatgcagatgggaatctgcagccatttgaaatgtctgaaatagatgattttttcataacagctctcatcatgcctatggatgatgatctagaaaaagagcgtgaaagaggtgtacgctgtgaaggatttgggcgtattgaggactgggcaatatctggttatgatgaaggtactgcagtggtctggctctcgacagaacttgctgattatgaatgtgtgaaaccagcaagcaactacaagtcttactacaaccacttctatgagaaggcacaggtatgtgttgaagtctacaggaagctcatgagatcagtaggtgggaatcctaacatgagtctggaagaattgcttgctagtgttgttcgctctgttaatgctatccaaggttacactggaacaatgagcaaagaattcatgattgccactggtgagtttgtatacaaccagctcattggtttggatcagacggcaggcaatgatgatgagaagcttgttacattgccagttcttcttgctctaagagatgagtgcaaatctcgagcagaatttaccaagatgccacttagcatttcaaatgggagcctgaagatcaaggatattgagtgtaaagaggtagctgaggacgatgatgagaaattagcaagattattgcatgaagaagaagaatggaagatgatgaagaaacagaggggtaaccgtggagtcccttcccagaaaaatgtctacatcaaaattagtgaagctgagattgcaaatgactaccctctgcctgcatactataaaccatctagccaggaaatggatgaatacatatttgatagtgaggatggcatgttctctggtgatgtgccagtaagaatcctcaataactgggctctatacaatgcagattctaggcttatttctctggaattaatccctatgaagtcaggcgcagaaaatgacatagttgtctttggatctggttttatgagagaggatgatggcagttgctgttccacagctgagtctgcaaagttgtcttcttcatcaagtaaagctgataatcaggatgtaggagttccaatatatttgagcccaatcaaggaatgggttatagaatttggtggctcgatggtttgcataaccattcgaactgatgttgcttggtacaagctacggcagccaataaagcaatatgctccttggtgtgaacctgtactgaaaacagcaaggcttgctgttagcatcatcaccctgctaaaagagcaaagccgtgcttcaaagctttcttttgctgatgtcatcaagaaagtggcagagtttgacaaagagaatcctgcctttatatcgtccaatattgtactggttgagaggtacattgtggtacatggacagatcatacttcagcagtttgcagatttccctgatgagacaattcgacgtagtgcttttgccactggcctgttgatgaagatggagcagagaagacatacaaagttgttcatgaagaaaaaggctcaagtaacaagaggagagaatctgaatccaattgcaacaatgggaacatcatcaaaaagaaaagcaatgcgtgcaaccacaacaagattgatcaacagaatatggagtgattactatgcacaccatttccctgaagatttgaaggagggagatggaaacgaagcaaaagaagttgatgatgaacaagaagaaaatgaagatgatgatgctgaggaagaggtacagattgaagaagacaaggttgcaaagactccaccatcaacacggtctcgaaaattggtatcacaaactagcaaagaaatgagatggaagggtgatccagctgggaaaacaacttctggagaagctttatacaaatgtgcgtatgcacgggaactcagaatagatgtcggaggggcagtcacactggaagatgattctggagaaatagtcatatgctttgttgagtacatgtttcagaaatctgatggtgcaaaaatggttcatggaaggattctgcaaaaaggctcagaaactgttcttggcaatgctgcaaatgaaagggacattttcttaactaatgactgtttggagtttgaactaaaggacatcaaagaattggtctctgtcaatctccaatcaatgccttggggtcacaagtatagaaaagagaattctgaagctgagaagattgagtgggccaaagtggaagagaggaaaaagaagggtctgcccatggaatatttatgtagaagcctgtactggcctgagaagggtgccttcttctctctacctcgtgataaactgggtcttggtaatggtgtctgtggctcttgtgagcacagagaaccggactgtgatgaattaagaatacttaccaagaccagcttcatttacagaaaggtaacctatagtgtccatgacttcttatacattaggcctgagtttttctcccaagaggaggatcgtggcacctacaaggcaggaagaaacattggcctgaagccctatgcagtttgccatcttttggatgtctgtggacctgctggttctaaaaaagttgaccctgcatcaacaaaagtcagtgttcgaagattttatagaccagatgacatttcaactgctaaagcttatacatctgatatcagagaggtatactatagtgaagatataattaatgtgccggtggatatggtagagggaaaatgtgaggtccgaaagaagatagatatctcaaattcagaccttccagtcatgattgaacatgtattcttctgtgagcatttctatgattgtgccactggggctctcaagcagttgccttcaaatgtaaagctcatgtctgtggctcgcaaggcaactggtgctttgaaaaagaacaagggaaagcagatctgtgaaaataatgaagttgattcaggcaaatggatggaggtgcccaaagagagccgtattgcaactctcgacatttttgctggctgtggaggtttatccgaagggttgcagcaagctggtgtgtcatttacaaaatgggcaattgaatatgaggaaccagctggtgaagcatttaggcaaaatcatccggaagctgctgtgtttgtggataactgcaatgtgattttaaaggcaatcatggacaagtgtggggattctgatgactgtgtctcaacttctgaagctgctgaacaagcagctaaacttgctgaagagaatattaaaaaccttcctgtccctggtgaagtagaattcataaatggcggtcctccctgtcagggcttttctggcatgaacagattcaaccaaagcccatggagtaaagttcagtgtgagatgattttagcattcctctcttttgcggagtattttcgtcccagattctttcttttagaaaatgtcaggaattttgtttcgttcaacaaagggcagaccttccgactggcggttgcatctcttttggaaatgggataccaggttcgttttggaatcttagaagcaggtacttttggtgttgctcagtccaggaaaagggcattcatttgggctgctgctcctggagagattcttcctgattggccagaaccgatgcacgtgtttgctagccctgaactgaaaataacactgcctgatggcaaatactatgcagctgccaaaagcactgctggtggggcacctttccgtgcaataactgttagagatacaattggggatttgccgaaagtggaaaatggtgcaagtaaactcgtacttgaatatggaggtgagcctacctcttggtttcagaagaagatcagaggtagcactattgcattgaacgatcacatatctaaggagatgaatgaattaaatctcataagatgcaaacatattcccaaacgacctggttgtgactggcatgacctgccagatgagaaggtgaagctatcttctgggcaaatggtggacctgataccttggtgcttgcctaacaccgctaaaaggcacaatcagtggaagggtctgtatgggaggttagattgggagggcaatttccccacgtctgtgactgatcctcagccgatgggcaaggttggcatgtgcttccaccctgaccaggataggattatcacggtccgcgaatgtgcgcgatctcagggctttcctgacagctaccagttttcgggcaccattcagagcaagcacaggcagattggcaatgctgtgccaccccctcttgcctttgcgcttgggaggaagctgaaggaagccgttgatgggaagcaccagcaggcctga

SEQ ID NO: 954 - DNA, 2613 bp, Triticum aestivum
  source 1..2613: mol_type = genomic DNA
atggaccgatcgccggcacctctcagcccaccaggtttcgctgtgccgctcgccgtcaagaagcggcagcaggcggcgccaggctacagcagcagcagcagcccgtggggagtccctccggcgccgcccctcaccaacaacaacaaccccaacccgcccaatggcctcagagcaggcgacaccagcatcttctccacctcgctgcccgtactgccgcacgaaaaattgaacttccctgactctgcacatggcaccccttcgatggacgatgcgtcagcgaagcttaaagattttgatgatgatcctcaggggaacgactacccgtttgactttgatctccggcagatcgacgacctgctgcccgatgaagatgagcttttcgctgggatcacgaatgagatggagccatcttcgcaggcgaatcctgtagaggaactggaggagtttgatgtgtttggcagcggagggggaatggagctggactcagaccctctggacagcatcacagctggtttggggaatgcaagtataagtgatgggatcagggccaatggagtaaacaacaattttggcctgtcaaacagtcctggagctgtggctggggagcatccgttgggggagcatccttccaggacattgtttgtgaggaacattaacagtaacgttgaggactctgaactgcgctctctctttgagcaatttggggatatccggaccctttacactgcaacgaagcacaggggctttgtgatgatatcttattttgatatccgggctgcacgtggtgcgatgcgttcattgcagaataagcctctgaggaggaggaagcttgacatacatttttctatcccaaaggagaatccgtctgacaaagatttaaaccaggggactcttgttatctttaacttggatccatcagtttctaatgaagaagttcgccagattttcggaacttatggggaagtaaaggagataagagagacgcctaacaaaaagcaccacaagtttattgagttctacgatgttagggcggcagaagctgctcttcggtcactgaataagagcgagatcgctggaaaacgcatcaagttggagccaagtcgtcctggtggaacacgcagaagcttggtgcaacaccttggtcatgaactagaagatgaaaccagaggttataggcattctcctcacgttggatcgcctatggctaactctcccccaggggcgtgggctcaatatggtagtccaaccgacaacaatttgctgcatgcattcagcaattcacctactggaaacggaatgagccctatcggaatgtccccttcaatgatgtcaaatgctctgaagattgcaccaattgggaaggacaacaactggtctaaatacgatcaagtattctcaaacagcaaccagtcccttggcgcagcgtttcagtattcacagtcataccaagatcgcaaaagtgagcatatgagctcgagtcctgggactttaacagggcccgagtttctgtggggcagcccaaagccttatccagagcattcccaatcctcatcaatgtggcgtccaccaccagttggtcatgcaatgtcatccagtagccgccctcagggtcagggcttcctgtatggtagtcgccaggcttcattgttcggatctttggatcaaaaccgtcatcatgttgggtctgccccttctggcgctccatttgagagccactttggatttttgcctgaatcgcccgagacgtcgtttatgaatcaagttaggtttgcgaatatggggaacattggcggtgctaaccgaaacgggggaagcctcatgctgaacatggcttctcgtgcttccctgaatcctgtttctgctctaagtggaagcctgacagataataactctactaacttcagaccaataccatcgccaagacttgggcaaccaccattctttgggaacaccacatatcaagggcctggttattatggacttgacagctcctccattgagcgtggtcgcaaccgccgagttgacagcagcgcgttccaggcagatagcaagaagcactatcagcttgatttggacaagatccgtaaaggagaggatactcggacaacattgatgattaaaaacattccaaacaagtacacatccaagatgcttttggctgcaatcgatgagctccacaaaggaacatatgacttcttctacctgccaattgatttcaagaacaaatgcaatgtcggttatgcgttcatcaacatgatatcccctgtgcacattgtatctttctaccaggctttcaatgggaagaagtgggagaaatttaacagcgagaaagtagcatcattggcgtatggtaggatccagggaaggaatgcactaatctcacatttccagaattcaagtttgatgaacgaggacaagagatgccgccccattctttttcattccaacgggccagagactggaaatcaggaaccatttcccaatgggatatgcatccacatgcctctggatggtggggcaggctccagcaaggagcccctcggctttgaagaggacgacaatcccagcgagatcaagatatccggggagaaatccatggcggggagtttgtag

SEQ ID NO: 955 - DNA, 323 bp, Triticum aestivum
  source 1..323: mol_type = genomic DNA
atggtttgtggaggacctccctgccagggcatcagtggattgaacagattcaggaattacaatgagccgctggaagatgatagaaacaaacagttggttgtctttatggatgttgttaactatctgcgacctaaatatgttctgatggaaaacgtcgtagacattctaaaatttgcagatggattcctggggcgatatgcgcttagtcgtcttgtctccatgagataccaagctaggcttggattgatggttgcaggatgttatgggttacctcaatttaggatgcgggcctttctggggggagctcttccttctcgggtttg

SEQ ID NO: 956 - DNA, 2277 bp, Triticum urartu
  source 1..2277: mol_type = genomic DNA
atgtcaaatcagccggacacgttgctccacggttaccgacctgtgctagacaggcccgaggatgaggaggacatgaaggcgcgcgtccactaccgctccgccatggtcgatggcgtggtctacgcgctgggcgacgacgtctacgtcatggctggggaaaatgaggctgattacattggcagaataactgagttttttgagggtgttgacaagaccagctactttacctgtcgttggtacttccgtccagaggacacggttatatctagagccaaatttgtcaatgatcacacacatgacccaaagcgtgtctttctctccgaggaaaagaatgataatctgcttgattgcatcatatcaaaggtcaagataatccatgttgatcccaatatggacccagcagccaaggccaaactggtggctcgcaccgacttatactatgacatgtcatatacagttgcttattctacatttgctaacatcccatcagacaccacagagaattctggtatttctactgatgctgattcagagaatgggaccccagtaaaaacggcatccctccttgacctgtattctggttgtggtgggatgtcaacagggctgtgcttgggttcagcacttgctggcctgaaacttgaaacagttcgaaatgaaaaagccgaggattttcttgcacttcttaaggaatgggcgattctatgtgacaaatatgtccatagcaatgattctgatgcagcagatcctgttgaggaagaggaagatgatgagcctcttggaaaggatgagtttgtggtggaaaagctacttgagatctgctatggtggcactgggaggaaaaatggaatctattttaaggttcaatggaaaggatatggcccagaagaggatacctgggagcccatagaaaacctgagtgactgcccattgaaaattaaagagtttgtgcaagaagggtacaggcgaaacattctaccccagcctggtcaggttgatgttatttgtggtggcccgccctgccaagggataagtgggttcaaccgatttagaaaccgtgataaccctttagaagatgagaaaaatcaacaaatggttacctatatggacattgtttcttatctgcaaccaaagtttgtcttgatggagaatgtggtggacattctgaaatttgctgatggctatcttggaagatatgcattgagccgtcttgtatccctgaactaccaagcccgccttggaatgatggtagctggttgctacgggcttcctcagttcagaatgcgggtgttcctttggggagctctccctaccatggtcctcccaaagtatcctctccctactcatgatgtagttgtacgtggtggtgctccaaatgctttctcgcaaagcattgttgcatatgatgagacgcaaagaccgactttgaagaaagctctccttcttggtgatgccatttcagatttgcccaaggcaagtgctttcttcccttgtttcatttcttcctcttctacatttgttcttacatccattattatgcaggtagacaactgtcaacctcatgaggtaattgaatatggtggtcaacccaagactgacttccagcgctacattcgacttagtcgtaaagatatgttggactattcctttggtgatgccacttgtcctgaagaaggaaagctcttggaccaccagcctttgaggctaaaccaagatgattatgaccgtgtccagcagattccgataaagaagggggcaaacttccgtgacttgccaggcgtcaaggtcggagcgaataacattgtggagtgggatccagatgttgagcgtgtctacctcaagtccggcaaacctttggtccctgactatgcaatgtccttcatcaagggcagatcaccaaagccgtttggtcggttgtggtgggatgagacagttcccacggtggtgaccagagcagagccccataaccagatcatactgcacccgaatcagggacgtgttttgactgtccgtgagaacgcaaggctgcagggtttccctgactactaccggatgtatggtcccatgaaggagaagtacatccaagtcggtaatgcggtggctgtcccggttgcacgggctctgggctactccttgggccgagcataccagggtgaggtggacgcggggtatgatgcgctgtttgttcttcctgacagcttcaccaacatcggacagaccggtgcgagggcaagggcctcctccgttgggacccctgcaggcgaggttgttgagcagtag

SEQ ID NO: 957 - DNA, 2607 bp, Triticum aestivum
  source 1..2607: mol_type = genomic DNA
atgggtaaatgtggggataggtgtgtggtgaaagccaatcatttcttcgcggagctccctgataaagaccttcaccaatacgatgtgaccataacgccagaggttacatcgcgaggtgttaatcgtgctgtgattgcagaacttgtaaagctgtatagacaatctcatatgaatggacgtctacctgcctatgatggaaggaagagcctttatacagctgggccattaccatttacttcgaggacatttgaaatcgctctgcaagatgaagatgaaggccttgttggtgggcaagccacgccaaggcgtgagagacaattcagggtggtgatcaaatatgctgcccgtgctgatctccatcatttggctatgtttctagccgggaggcaaccagatgcacctcaagaagctcttcaggtgcttgacattgtgctacgggaattgcctactgccaggtattccccagttagtagatcattttattctcccaacctagggagacgtcagagacttggggacggtttggaaagttggcgtggattttaccagagtataagacctacgcagatggggctttcgctgaatattgatatgtcttctacagcatttatcgagcctctccctgtgattgagtttgttgctcagcttctgtgcagagacatctcagttagaccgcccactgattcagatcgtgtgaagattaaaaaagccctacgaggtgtaaaggttgaggttacacatcgaggaaacatgcgtaggaaataccgtatatctggcctcacatcacaagcaacacgagagctatcattccctgttgatgatcgtggtactgttaagactgtggtgcaatacttcctggagacgtatggtttcaatattcagcacaccactttaccttgcttgcaagtcggtaatcagcaaaggccgaattatctccccgtggaggtttgtaagattgttgaaggacaacgctactcaaaacgactgaatgaaaaacaaataactgctctactgaaagtgacttgccagcgccctcaagagcgtgagaaggacatcttgcagactgtgcatcacaatgcatactatgaagatccatatgcacaggaatttggcataaaaatagatgagcaacttgcatcggctgaagctcgtgttctgcctccgccaaggcttaagtaccatgatagtggcagagagaaggatgtcttacccagggtcggccaatggaacatgatgaacaagaaaatggtcaatggtggtagagtcggccactgggcatgtattaacttctctcggaatgttcaagataatgctgccaaggttttctgtcatgagttggctataatgtgccaaatatctggaatgaactttgcacctgaacctgtgctgcccgtacttagtgcgaggcctgaacacgtggaaagagcactgaaggcacgctatcatgatgccatgaacgcaagcaaacccccgggcaaagaacttgacctgctaattgttatactgccagataataatggttctctttatggggaccttaaaggaatttgtgagactgaacttggattggtatcccagtgttgtcttacaaaacatgtttttaagatgagcaagcagtatcttgcaaatgtagctctcaaaatcaatgttagggtggggggaaggaatactgttcttgtggatgctttggcaaggaggattcgccttgttaccgacagaccgaccataatatttggtgctgatgttacacatcctcaccctggagaagattctagcccttccattgcagctgtggttgcttctcaagactggcctgagataaccaagtacgcaggattagtgagtgcccaagcccataggcaagagctgatacaggatctttttaaagtatggcaagatccccaaagaggaactgttactggcggcatgatcaaggagcttctcatatctttcaagagggcaactggacagaaacctcagagaatcatattttacagggatggtgtcagtgagggacagttctatcaagttctgttgtttgaacttgatgccattcgtaaggcctgtgcatccttggagcccaattatcagcctccagttacctttgtggttgtccagaagcgtcatcacaccaggcttttcgctaacaatcacaatgatcagcgtactgttgatagaagcgggaacatactgcctggcaccgttgttgactcgaagatctgccatccgacagaattcgatttctacttgtgcagccatgctggcattcagggaacaagccggcctgctcattatcatgttctgtgggacgagaacaaatttactgctgatgagttgcaaactctcacaaacaacttgtgctacacatatgctcgatgcacccgctccgtatcaattgttcctcccgcatattatgcacatctggcagccttccgggctcggttctacatggagccggacacctctgacagcgggtccgtggctagcggtgcacgtggtggtcctccacagggcggtccacgcagcagcaccaggttcgggaatgttgctgtcaggcctctccctgccctcaaggaaaacgtcaagcgcgtcatgttttactgctag

SEQ ID NO: 958 - DNA, 3363 bp, Triticum urartu
  source 1..3363: mol_type = genomic DNA
atggttaggaagaaaagaactggtcctggcagccctggagagagttctggggaagcttccggagcttctgggcagggttcctcgcagcgagcagagagagctcctcaacagcatggtggaggacgtggtttggcacctcaacagcatggccgtggtggggggcaacagcagggccgcggtgggcactatcagggccatggaggatcagcttcacactatccaggtggtggcccacctgaatatcaacagcgtgactatcaggggcggggacatccaggtggtggtccacctgaatatcaacatcgtgactatcaggggcgtggacatccggggggtggcccacctgaatatcaaccacgtgactatcaggggcgtggacatccggggggtggcccaactgaatatcaaccacgtgactatcagggacgtggtggtccgtgccccagaggtggagtgccgcagccatactatggcgggcataggggaggtagtgctggacgtaacgttcctccaggtccatcaagaacagttcccgaactgcaccaagccccgcatgtccaatatcaagccccggtggtttcaccatccgcatcgggagctggctcatcctctcagcctgtgtcagaggtgagcagtggacaagtccagcaacagtttcagaaacttgcgattgttgatcaaagttcaacaagccaatccagtcaactggcaccagcatcaagcaaatcagttagatttccattgcgccctggaaagggtacacatggagataggtgtgtcgtgaaggcaaaccatttctttgctgagctccctgataaagaccttcaccaatatgatgtctccataactccagagattacatcacgtggtgtcaatcgtgctgtgatggcagaacttgttaggctctatagacattctcaattggatggacgcctacctgcgtatgatggaaggaagagcctatatacagctgggccattgccatttccttcaaagacatttgaaattactctgcatgacgaagaagaaagccttgttggtggtcaagtcgcaccaaggcatgagagacaattcagggtggtgatcaaatttgctgctcgtgctgatctccaccatttggctatgtttctagctggaaggcaacccgatgcacctcaagaagctcttcaggtgcttgacattgtgctgcgtgaactgcctactgccaggtattctccagttggccgatcattttattctccaaacttagggagacgtcagaaacttggtgatggtttggaaagctggcgtggattttaccaaagtataagacctacacagatggggctttcgctgaatattgatatgtcttctactgcatttattgagcctcttcctgtgattgattttgttgctcagcttctgagcagagacatctcagttagacccttatctgattcagatcgtgtgaagattaaaaaagccctaagaggtgtaaaggttgaggttacacatcgaggaaacatgcgtaggaaataccgtatatctggactaacttcacaagcaacacgagagctatcattccctgttgatgatcgtggtactgtgaagactgtggtgcaatacttcctggagacttatggttttaatattcagcacaccactctaccttgcttgcaagtgggcaatcagcaaaggcctaattatcttcctatggaggtttgtaagattgttgaaggacaacgttactcgaaacgactgaatgagaaacagataactgctctactgaaagtgacttgccagcgccctcaagagcgtgagaaggacatcttgcagacagtgcatcacaatgcatactatgaagatccatatgcacaggaatttggcataaaaattgatgagcgacttgcatcggttgaagctcgtgttctgcctccgccaagacttaaataccacgatagtggcagagagaaggatgtcttgcccaggatcggccaatggaacatgatgaacaagaaaatggtgaacggtggtagggtcagtcactgggcatgtataaacttctctcggaatgtgcaagatagtgctgccaggggtttttgccatgagcttgctataatgtgccaaatatctggaatggactttgcacctgaacctgtgctgcccccacttactgcgagacctgaacatgtagaaagagcactaaaggcgcgttatcaagatgccatgaatataatcagaccccagggaagagaacttgacctgctaattgtaatactgcctgacaataatggttctctttatggggacctcaaaaggatttgcgagactgatcttggattggtatctcagtgttgtctgacaaaacatgtttttaagatgagcaagcagtatcttgcaaatgtagctctgaagattaatgttaaggtgggtggaaggaatactgtacttgtggatgccttgacaaggaggattccccttgtcagtgacagaccaacaataatatttggtgctgatgttacacaccctcatcctggagaagattccagtccttccattgctgctgtggttgcttcccaagactggcctgaggtcactaagtatgcaggattagttagcgcccaagcccataggcaagagttgatacaggatcttttcaaagtatggcaagatccccaaagaggaactgtgactggtggcatgatcaaggagcttctcatttctttcaagagggcaactggacagaaaccccagagaatcatattttacagtattttcagggatggtgtcagcgagggacagttctatcaagttcttttgtatgaacttgatgccattagaaaggcatgtgcgtccttggagcccaattaccagcctccagttacttttgtagtcgtccagaagcgtcatcacaccaggctttttgctaataaccacaatgatcagcgtactgttgatagaagcggaaacatactgcctggcactgttgttgattcaaagatttgccatccgaccgagttcgatttctacttgtgtagccacgctggcattcagggaacaagccgtcctgctcattatcacgttctatgggacgagaacaaattcactgctgatgagttgcaaactctaacaaacaacttgtgctacacgtatgctaggtgcacccgctctgtatcaattgtgcccccggcatattatgctcatttggcagccttccgggctcggttttacatggaaccggatacctctgacagtgggtccatggcaagcggtgcccgtggccctccacagggtggacgcaataccaggccgtttgggaacgttgctgtcaggcccctccccgccctgaaagaaaacgtgaagcgggtcatgttttactgttaa

SEQ ID NO: 959 - DNA, 2748 bp, Triticum urartu
  source 1..2748: mol_type = genomic DNA
atgccgtcgcagcctcccactcaacccctcctcacccggacggagcgccgccgccccttctccgcctccggcctgctcgcccgcggcccgtcaggaaccctagcatggccgtgccagaaaattactctactgtgctgtgcccccttgagtattgggagttcgatttgggatccagacttcttcccccacttgattgactctatactacagggcttcttccgtttcaactggatttttttctggtctcaattgaatgaagtctccattaacccggagtcaaaatcaagggctgtgaacagggaggtactcagtgagctaatcaagttgcacggcaagacatcccttgggggcaaattgcctgcctacgatggaagaaagagtctttacactgcaggctcactcccttttgagtctgaggagttttctgttacactggttgatcccgaaaagaaagacaaagaaaaggctgaaagggagtacaagatcaccattcggattgctgggaggacagacctgtaccacctccagcagttcctcaaaggaagacagagggatatgcctcaagaaaccatccaagttcttgatgttgtcctcagggagtcaccatcctggaactatgtcacagtgtccagatccttcttctccaccacctttggtcacagaggagacattggtgaaggattagagtgctggagaggttactaccagagcttacgtccaacccagatggggctgtcactcaatatagacatatctgcgacatccttcttcaagcctgtgacagtggtccagtttgtgctagagttcctcaacttacgtgatgcctcgcggcctctgacagacagggaccgtgttaagataaagaaagcactccgtggggtgcgtgtcgaaacaaaccaccaggaagaccaaatccgaagatacaagataacagggattactcctgttcccatgagccagctcatatttcctgttgatgagagaggaacaagaatgtcagttgttcagtacttcatgcaaagatacaaatacaatctgcagtatacttcttggccctgcttgcagtctggaagtgatgctcggcctgtgtatctgcctatggaggcgtgcaagattgttgaagggcaaaggtactctaagaaattgaatgacaagcaggtcaccaacatacttagagctacctgtcaacgtccccagcagagggagcaaagcattcgtgagatggttctgcacaacaagtatgctgaggacaagtttgctcaggagttcgggatcaatgtctgcagtgaccttgtctctgttccagcccgtgtgctgcctccccccatgttgagatatcatgattctggaaaggagaaaacttgtgcgccaagtgttggacagtggaacatgattaacaagaaaatgatcaatggaggaatcatagacaactgggcctgtgtgagtttttcacgcatgcgtcctgaggaggtatacaggttctgttgtgatctgattcagatgtgcaatatgactggaatgtctgtcaatccaaggccacttgtagacaaccgatcagctagccccaaccacatcgagaatgccttgagggatgtatacaggaggaccaccgaaatgcttggaaaacagggaagcgaaaaacagctacaactgttaattgtaatcctacctgaagtcagtggttcttatgggaaaatcaagaaggtttgtgagactgaccttgggatcgtgtctcagtgttgcctgccaaggcatgcttccagaccgaacaagcaatatttggagaatgttgcactcaaaatcaatgtgaaggtcggaggacgcaacacagttctggagagagcttttgtgcgaaatggcataccgtttgtgtccgaagtcccaacaatcatctttggtgctgatgttacacaccccccacctggagaggactctgcatcatcaattgctgcggtggtggcatcaatggactggccagagatcaccaagtacagaggtcttgtctctgcccaaccacacaggcaggagataatcgaagacctcttcagtgtcaccaaagatccgcagaggggtaatgtcaatggtggcatgatcagggagttgctgattgccttccgcaggaagacaggccttaggcctgagaggatactcttctacagggatggcgtaagtgaaggccaattcagccatgttctgcttcatgaaatggacgcaatcaggaaggcctgcgcctcgttagaggaggggtatatgcccccagtcacctttgtggttgtccagaaaaggcatcacaccaggctattccctgaggttcatgggaggcgtgatatgaccgacaagagtgggaacatacttccaggaactgtggttgacctcatgatttgccaccctacggagtttgatttctacttgtgcagccatgctggcattcagggaactagcaggccaacacactaccatgttctttatgatgagaatcacttcacagccgatgcgcttcagtcactgaccaacaatctctgctacacctatgctcgttgcactcgtgcggtctctgttgtcccaccggcctactacgcccatcttgccgcattccgtgcgcgctactacgtggaaggggacagctcggacggcggatcgacccccggaagcagcggtcaggcggcgattgcgcgtgagggccctgtggaggtgcgccagctcccaaagatcaaggacaacgtcaaggacgtcatgttctactgctga

SEQ ID NO: 960 - DNA, 2751 bp, Triticum aestivum
  source 1..2751: mol_type = genomic DNA
atggagtcacacagtgatgacttgccaccaccaccaccactcccgccaaatgcagagccgataaaagctgagtcggctgatgacttgccaccaccaccacccctgccgcctatcaaacctgaagaagcaaagaagatctcaaagcctaagagggccctgatcgctcgtcctggttttggcaagaggggaaatcctatacagcttgtgacaaatcatttcaaagtctcgttgaagacgacagatgaattcttccatcattactatgtaaatctgaagtatgaagatgacaggcctgttgatggaaaaggtgttggtagaaaagtcattgataagcttgctcagacttatccatcggagctagcccataaagactttgcctatgatggtgaaaagagtctttttaccattggtgccctcccacaaattaacaatgagtttgttgtggttcttgaagacgtttccagtggaaagactcctgcaaatggcagccctggaaacgacagtccagacaagaagagagtgaaaaggccatatcagactaaaaccttcaaggtggagctgagttttgcagctagaatccccatgagtgctattgcaatggcactcaaaggccaggaatcagagcacacgcaagaagccgttcgggttattgatatcatattaagacaacactcttccaaacagggctgcctgttagtccgccagtcactttttcacaacaatccttcaaactttgtggacttgggtgggggtgtgatgggctgccgaggtttccactcaagctttcgagccacacagagcgggctttctcttaatattgatgtttctacaacaatgattgtgaaacctggccctgttgttgattttctgctggccaaccagaaggttgaccaccctaataaaattgattgggctaaggccaagcgtgcacttaagaatttaaggataaaaacaagcccagcaaatacagaatacaagattgttggtttgagtgagaggaattgttatgaacagatgttttccctcaagcaaaggaatggtgggaatggtgaccctgaagcaatagaaatatctgtttatgattactttgtgaagaaccgtggcattgagctgaggtactctggtgatttcccttgtataaatgttgggaaacctaggcggccaacatatttccccattgagctctgccagctggtgcctttgcaaaggtataccaaatctttgagtaccctacaaagaccatctcttgttgagaagtccaggcagaagcctcaagagaggatgtcagttttgtctgatgtactgaaacgcagcagctatgatacagaacccatgctgaaggcatgtggaatttcgatagctcagggctttacacaggtggctggtagggtactgcaggcccccaagctcaaagctggaaatggtgaagatattttcacaaggaatggacgttggaatttcaacaacaagaggcttgctagagcttgtgtggtggacagatgggcagttgtaaacttttcggctaggtgtaacaccatgaaccttgtcaatgacctcatcaagtgtgggggcatgaagggcaatacagtagaaaaacctcatattgtaattgaagagaatggttcaatgagacgtgcacctgctccaaaaagggttgaggatatgtttgagcaagtgaagtctaagcttcctggggctccgaagtttctcttgtgtattcttgctgagaggaagaactcagatgtttatggtccatggaagcgaaaatgccttgctgactttgggtttgtcactcaatgtgtggccccaacaagggtcaatgaccaatatctgacaaatgttctgctgaagatcaatgcaaaacttggtggaatgaactcactacaacaaattgaaatgtccccaagtatacctcttgtatcaaaggtcccaactctcatcttgggaatggatgtgtcccatggatcccctggacagtctgatataccgtccattgcagcagttgttggttctcgggaatggcctcttgtctcgaaatatagggcttcagtgcgctcgcagtcaccaaagctcgaaatgatagattcattgttcaagccacaaggaactgatgatgatggccttgttcgggagtgtctcattgacttctacaccagttctggaaaaaggaaaccagatcagatcatcatcttcagggatggtgttagtgagagccagtttaatcaggtgctgaacattgaattggatcaaataattgaggcctgcaagttcttggatgaaaattggaaccccaagttcacgctgattgttgcccagaaaaatcaccacaccaaattcttcatacctggatctcctgacaatgtccctccaggcactgttgtagataatgcagtctgccatccaaggaattatgacttctacatgtgcgctcatgctggaatgattgggactacaaggccaacacactaccatatcctgcatgatgagatacactttgctgcggatgacctgcaggatcttgtgcactcgctctcatatgtgtaccaaaggagcacgacagccatatcagttgtttctccaatctgctatgcacatcttgcggctgctcaggtggcgcagttcataaagtttgatgagatgtctgagacgtcgtcgagccagggcggtggccacacctctgccggcagcgctccagtgcaggagctgcctcgtccccatgagaaagtccgcagcagcatgttcttctgctga

SEQ ID NO: 961 - DNA, 2340 bp, Triticum urartu
  source 1..2340: mol_type = genomic DNA
atgatcgtgcgagcgaaccacttcctcgtcggcttcgcggacaaggacatctgccactacgatgttgcaattactcctgagcccaagacaagacggatcaacagggttctaatgacggagctgacaagcaagcaccgcgtgtcgtctctcggtggcctactggtcgcatacgatggcagcaagagcctgtacactgcaggcgagctgccattccaggcgatggatttctccatcaagctggggaaaccaccaagagaaacctatgtcaccgtttctcgatccttctactccacaatatttggccaacgtgacatcggtgatgggctggagtgctggagaggatattaccaaagcttgcgccccactcagatgggcctctcactgaatatagatatatcatcaacgccattttacaaacctatatcggtgatgcaatttgttcaggagtgtctgaatctgaggaatcccgaccccaatcgccccctttctgacagggaccgtctgaagcttaggaaagcattgcgcgggattcgtgttgaaaccactcatcaagagggcaaaaggagtgcctacaagataactgggattacttctgttccgctgattcagctcaactttcctctggatgaaggcaaccaaatgactgttgtgcaatacttttggggccgatacaagtatagattgaggttcacttcttggccttgtctgcagtctggaaatgattctcgccctatatatttgccaatggaggtatgcaaaattattgaagggcagaggttcaccaggaagcttaacgagaaacaagtgactggcatactgagagctacgtgcgaacgcccccgtgatagggagaacagcatacttaagatggtggagcacaacaactattcagctgataagctggcgcaggagtttggaattgatgttacagataaaatgctcaaatatcatgaatctggaaaggacaaagcttgtgcaccaagtgttggccagtggaacatgattggcaagaaaatgataaatggagggaatgttcagagatggacttgcttgaacttttcacgtttgcacattgatggagtcaaaaggttttgtggcgacttagtcaaaatgtgcaacgccatcgggatggttttcaatcctatgccagtggtagaaattctctcagcgtccgccaataacatagaaggtgctttgaaggatgctcaccagagtgcccgtgacctccagttgcttattgtgattcttccggatgttactggccattacgggaaagttaagaaggtgtgcgagactgaccttggtatagtatctcaatgtctcaagccagacaaggtcgaaagagcaaacaagcagtattttgaaaatgttgcacttaaagtcaatgtcaaggtcggagggagaaatacagctcttcagcaagctcttacacgtcaaataccgttagtcaccgatcaaccgacgatcttttttggtgctgatgtaacacatccggcggcaggggatgattcctcaccgtcaattgcagccgtggtggcctccatggactggcctgaaatcacaaagtacaaagctgtggtttctgcccaaccgcccaggcaggagattattcaagatctctattgcacaggcatagaccctgagaagggcacccctgtacacagtggaatgatgcgggagttgctagtgtcattctttcagaagaccaaacataaacccagcaggatcatattctacagggacggtgtgagtgaagggcagttcgcccaagttctgatgtatgaaatggatgccatcaggaaggcttgtgcatctttgcaggaggattatcagccccctgtgacatttgtggttgtccagaaaaggcatcacacaaggctcttccctgaggtgcacggaaaagagaccgacaaaagtggaaacatccttcctggaaccgtggtcgacaccaacatatgccatcccaccgagtttgatttctacctgtgtagccatgccgggattcagggcacaagcagaccaactcactaccatgtcctcttcgatgaaaaccgtttcactgccgatgggctgcagctgctcaccaacaacctgtgctacacatacgctcgatgtactcgctctgtctctgttgttcctcctgcctactacgctcacctggctgcgttccgcgcacggtattacgacgagccatcggagggctcggacagcgcctcgatcgtcagcggtggcacccgggagtcagctgccaccggcgcaggagctgctggtcctcctgggacataccgtcgcctccccaggatcagggataacgtcaaggacgtgatgttctattgttga

SEQ ID NO: 962 - DNA, 2445 bp, Triticum aestivum
  source 1..2445: mol_type = genomic DNA
atgtcgggaaccgcggccccacggtacgcgccggacgaccctacggtgccgaagccgtggcgcgggctggtggacggcaccaccggctacctctactactggaatccggataccaacgtcacccagtacgagaagcccgtgccgccggaagctcagctcccgccgcccccgcctctcccgcctcctcctccgcgcgcccgcggccgggaccgtcgagaccgttcccgttctcgctcccgctcccgttctcgcacaccgcctcggcgtgaacaccgggaccgcgaccgcgaccgcgacaggcgccgtcacgacgagcacgactcgttcaagccgtcgtcgtcccatcaccatcttcctccggctgccaccatcatccctaccgccgcagctgatgatccatcagccgaagcataccgccgtcgccatgagatcacagtcatcggggataacgtgccggctcccataactgagtttgactctggtgtcatcccgcttgatatactcaaggagatacaacgcgccggattcccaagtccaacgcctatccaagcccagtcctggccaattgccttgctcaatcaagatgttgtagctattgccaagacaggatctggaaaaactctcgggtatttgcttcctggctttatgcatataaagcgtatgcagaacagcacaaggtctggcccaacagtgttagttttggcacctaccagagagctcgcaacacagattttggaagaagctgtgaaatttggcagatcatcaagaatttcttctacgtgcctttatggcggtgctcctaaagggccccagttaagagatttagaaagaggggttgatgttgttgttgcaacacctggaaggttgaatgacattctagaaatgcggaaaataagcctaaagcaggtctcgtaccttgttctagacgaggctgaccgcatgctagatatggggtttgaaccacaaatacgaaaaatagtaagagacataccttctggtcggcaaactcttatgtacactgctacttggcccaaggaagtccgaagaattgcagatgagcttcttgttcaccctgttcaggtgaccattggaagtgtggatgagcttgttgctaataaagctattactcagcatgtggaggtggtcactccctcagaaaagctttggcgtctggagcaaatattgcgatcccatgattcaggttccaagatactaatattctgtaccaccaagagaatgtgcgaccaactatcaaggacactcaataggcaatttggagcggctgccattcatggtgacaagtctcaaaatgaaagagagaaggtcctgagtcaatttagatctggacgatctcctattttggtggctacagatgttgcggcacgaggtttagacatcaaagatatcagggttgtgatcaactatgacttccccactggtgttgaggactatgttcacaggattggcaggacaggaagggctggtgccactggtttggcctatacgtttttgtgtgatcaggattcaaaatatgccgccgacctaattaaaatcctggaaggggcagaccaagatgttcctcctgaactgttagacatggtctctcggggtgggcgtggtaggaaacgtaacaaatgggcaacccgctctgagaggggtggtggttcacgccctgaactggattcaaggtatggtggcaggttagagggtagtcgcggtggacgtggaaaggatgattatggtggccgtagcaggaatgatcacggcgggtctcgcaggtctgctagaggtcgcagcagaagccttagcaggagtgacagtgataggcgcagcccaagccccaagagacggcgccatgatgtgcagtctagccgtagcaggactagaagtcggagtcggagcaggagcaggagcaggagcaggagcagaaacaagagcaggaataggagccggagcaggagttacactaggaatcgtcgtgctagccgcagcaggagtcgtagccctggcgctagacgcaggcctgaaagaagagctggctctgggtctacacgtcctgactctgcccacccagtggagaagaaaagctcacccaatgctcacccttcaaatgaccacaggagccgcagtgtcgacccttcaaatgactatcaggcggaggatgggaagatgggaaaggttgatctggatcggtcgcccagtccgcaggagcaggatgacaagtctgctccatatagttctgtgtataatggcgaaggaggcagggggtcaatgagccctaatggcgagccagtggtggatgctaaacctgtggaagtctctgtgagcagcaagaagagggaggatgaagaggaaggtatgattgatgaagagggagaggagggtatgatagccgatgatgaccctcgcgcaagtgcagctgtgcaaaacggtggtgataagtga

SEQ ID NO: 963 - DNA, 4539 bp, Triticum urartu
  source 1..4539: mol_type = genomic DNA
atggcgagcgagccggaagaaggtctacactttctgcagagcaaaatggtcccagttaatgtttgccaagatctaggcctatactggagcgacaaagaatggggtaggctgctgcccatgacatgcttgtcggctttgccagccacaagtcggatggacagccaattggtcgagctctgcatcagccgctgtggtgaatggttggtctctagtgttgcctactccctgcaatgcgggtctaacaagcttaattacaccaaatgtatcaacagccttgaagaattattgcatgccaaggtctgttcggttgataatgcagagctggaaagtgtgcttgcttttcctgatatggaggtgtacacttacgtcccgcttagtcactctaatcttactgtaacttacaacaaagaacttgatcgctcaaagcttgagagtgaacgcatactacgcgagagcctatacgatttcaaggattctcagaagaaactaaagtccctggggaggttgcatggaaatttagtattctgtttgcaagaacttggttcgtttggagctctgcaagctgcaaaggctttcctttcatctgatggtgatgttttggacagaaaggagtctgacatgaacgacaattctaccagatttaagcatcattacctaaacaaagcaatttctgttctgaattgcaacatattagacgcccttcacgaatctgacaagacgtgctttctaggtacccatgatgattcatttcatctagagatgctagaagaacctttcttctcaaataaaattgtggttcttattaaaattctctcgagatacaggctagaggaaaacatgaagtgcatagttttcgtgaaaagaataactgttgcaagagcaatagcacatatcctccaaaatttgaaaggccttgatctttggaaatgtgagttccttgtgggacgccactcgggaccaaagaacatgtcaaggcagaagatggatgctattgttgaaaatttctcttctggcgaggtgaatcttttgattgctaccagtgtaggtgaagagggtctggacattcagacttgttgcctcgttgtgcggtttgatcttccagaaactgttgccagttttatccagtcgaggggacgtgctcggatgacaaattctaaatatgttgttctcctggagaggggcaatcattctcaagaaaagttgcttaatgactatattgatggtgaaggcattatgaatggagagatagacttgagaacttcaaatgatgtgtttgatcacctcgaggagaaaagttatcgagtggaaaaaacgggtgcttccattagcactgcatgtagtgtatctctactgcatcgctactgctacaaccttcccaaggacatgttcttcaatccttccccagcattcatctacattgatgacactgaggggataatctgcagagtaattcttccaccaaatgctgcttttcgtcaagtggatggccaaccatgccaatcaaatgacgaggctaagagggatgcatgcttagaggcatacgtgaaattgtatgaattgggtgctttgacagattttcttctgcctggttcaggttcaggaaagaacagggcatcaacaacaaacggttcagcaagcaacagtcatgatgatgaaagtctaagagaagagcttcatgagatgttaattcccacaattctcaaaccttcaacatgcaaactggactgtccattgaacttgcatttctactatattcaattctttcccataccagcagatagacattatcggatatttggtctttttgtgatcaactcccttcctatggaagctgaaaagttggaggttgatttgcatctggctcgcggcaggattgtgaaagcaggaaagaaacaatttggggcgatgatgctggcacgcaatttccaagaaatgtttctgaaggttctcctggacagatctgagttcactgtatctcatgttatgttgttgggcaacagtgaaacgctacagtttaattcaaccttttacctgctgcttccaatcaagcaggaattgtatggtgatatatttatgattgactggcaaacagttaagcgctgtttatcatcaccggtttttaaagatccaactggtgtgtctgcgcatggatcatatttgccagatgagtctttaaggcttcttgataatatgtacagtaaaactgatgtcgttggcagtctaatctttgctccccatattaagacatttttcgtcattgatgtcattctgaatgaactaaatgctagaagtgaatacgacggtgctacttatgaagatcattacaaggaaaggtttggtatcaaactatcacatcccgagcagccacttctgcacgctaagcagctctgcaatctgcataatttgcttcatgaccgattacgggagaccacagaagaaggtcgtgaattgatggagcactttgtggagttgcctccagagctatgttctttgaagataattgggttttcgaaggatatgtgtagctccctgtctttgttaccatcgttgatgtgtcggttggagaatttgctggtagctattgagttgaaggatgtcatgttgtcttcattctcagaggcttctcaaattagtgcctctggtatccttgaagcacttaccaccgaaaggtgtttggagaggatttctttggagcgctttgaagtcttaggtgatgcttttttgaagtatgtagttggacgtcacaactttcttacatatgaaggacttgatgaagggcaattgaccagcagacgttctgctatagtgaataattcacatttatatgagttatcaatcaaaagaaatttgcaggtgtacatacgggatcaacactttgaaccgacacagttcattgcactgggaaggccttgtaaagttgtttgcaatgctgacacagaagtgaatatacacacagatagtcgagaaaactgtaacttgaggtgtacaaagtcgcatcattggttgcataggaagactatagcggatgctgttgaatcgcttgtcggagcatttcttgttgaaggtggattcaaagctgcatttgcattccttcactgggtgggaatagatgttgattttaaagattcatccctatatagagtattagatgcaagctccatcaatttatctctcacgaaccacaccgacgtcggtgagcttgaggaattaatcggttacaatttcaaacacaagggtctaattctcgaagcatttgtgcatccttcattcaataaacattctggaggatgctaccagaaattggagttccttggagatgctgttttggaatatttgataacctcgtacctctactcagcttatcctgatctaaagcctggtcaaataaccgatttaaaatcgttagctgtcagtaataattcgcttgcatatgtggcagtccagaaaggtatccataagtatcttataaaggattcaaattatctttcgtcagcagtgaataagtttgagaattatattagacttcccaattcagagaaagacttggtagaagaaccagcatgcccaaaggttcttggtgatattgtcgaatcttgtgttgctgcagttcttttagattcaggattcaacctgaactacgtttggacgctagtgcttatgcttctaaagccagtgttgagcttctctgacatgcacatgaatcccatgagagaaattcgggaactttgtcaatctcatgaacttgagttaggccttcccgaacctatgaaagccgatggagagtaccacgtcaaagtggaagttaacataaacagccaggtgataagttctgccgctgcaaaccggaattcaaaagttgctaggaagtttgctgcacaagaaacactttctaaactgaagaattatggatacacacataaaaacaagtcactggaagagattttgcgagatgctaggaagaaagaaccagaactactaggttataatgaagaaccaatcaaagtcgaggctgacatatctgcagaaacaaataatctgaagataggtaaagaaagggatgcaaacatctctttccaaaatacagcaatttctattcgtgggactcttagaacctctagccaaagaacagcagggaataccatgttttccaaggatgatgtcagtattgaaaggaataatcagctcaaggttgcaaagcagaatgcctgtctgccgaagggaacaactcagaaaaatattagaaaggagtatcatggtgatatggtaaataaaacagcaaagtctttcctttttgaagtatgtgccgtaagttattggataccccctgaatttgaattgtgcaaagaagaagggccaagccacctccgaagattcacgtacaaggttacagttcagatcaggggaccctcggagacactcttggagtgctacagcgatgctcaactacagaagaaggccgcacaagagcatgccgcgcagggggctctgtggtatctcaggcaacatgggtacctacccaaagatgaagttcgtgtgtag

SEQ ID NO: 964 - DNA, 2844 bp, Triticum urartu
  source 1..2844: mol_type = genomic DNA
atgggtggcaagactcttcaggtgtcaggatttcctgcaactgtcaatgcagaccatgtcaaggatttgctggaacgaattgttggtgtggataacgtctgtgtggttaagctcaggcctccgaagaacaactctgcaaactcaagatcttttgccattgttcagttccagaccgaggcacatgcttcgctggtggtgaatgcggctcgtgggaatgcacttaggagtggaagcaattatctgaagaaatacagacttgaactttcatatgagagcatatgggagatccagcttcatgatccacctggatcacaaaaaaagttccttttgattcaggttctggctgctccaaaaatttacgaacaaaacttacagcattctggctctatgtacgacgatccattattcaactattttagggatgatactgatgatcagtggaccagaactactgattttactccattagccagcattgggcaatcatatattctgtgtctggagctaccacatgattgtgatctccccaacattcaagagtactttgtttactataaagaacacaagcgtgactttcattgccatcgtggacattcatattcaagcaatacttgctttgctccaattgtgaaatctctttatttcactgatatcccctatgagatactcttcaagatcaaccacatggttcagaatgggacacttagtgggccgacacttgatgacaacttctaccgtctggactgtgagaagcttcgttcgactgatttatcaccacgttctgctcccggaaataatgcaaggagaactgctctgtacaacagaattctgtcggtcctttcaaatggcatcactattggtaacaagcactttgagtttttggctttctcttcaagccagctgcgggataactctgcgtggatgtttgcttctcgtccggggttgtccgccagtgacatcagggagtggatggggaacttccgtaatattagaaatgtggcaaaatatgctgcaaggcttggtcagtcctttagcgcctcaacagaaaccttgaaagtacataagtatgaggtgcatgtaattccagatataaaaaatggtacgaagtatgtattctctgatggaattggaaccatttcagctgattttgcagacgaggtgtctaagaagtgcaaattggcccgctttactccctctgctttccaaataaggtatgggggttacaaaggtgttgtcgctattgatccaacatcacactggaaactttctttaagaggaagcatgtcaaagtttccgtcagacaacatcacactggatgtccttgcatacagcaagtaccagccatgtttcctgaatcggcagttaatcactcttctttcaactcttggagttagagataacatatttgaactgaagcaacaagaagttgtgaagcagttaaacagaatggttactgaaccacaagctgctattgatgcaattgaacttatgcccatgggagagattaccaatgttgttaaagaattgctgttatgtggctacaagccggatgttgaaccatatctttctatgattctacaaacctttagagcatccaagttgctagaactgaaaacgaagtcaaggatattcatcccagaaggacgagcaatgatgggatgcttggatgaaacccacacactgaagtacggagaggtattcattcaagcttctaatagtgcaaatgacagtgacaagttcgtcgtaactggaaaagttgtcgttgccaaaaacccttgcctccaccctggtgatatccgtattctcgaggctgtttatacccctgttctggaccatatggttaactgtgttgtctttccgcagcaggggccaaggcaacaaaatctcatttctgtaaatatgttcttatttggtactagaaatcaacagtggaagataaaacaggaagtacatgagtatttcgcaaattacatagttaatgagagtctgggaatcattgccaacgcgcacgtggtctttgcggatagggaaagcttgaaggctgaaagtacaccatgcattaagctggcagagctcttctccgttgctgttgattacccaaagactggagtgccggctcaaattccgggcgaactacatgtgagggagtatccagattttatggagaagctcgacagggtcacctacgtatctgagggagtaatagggaagctgtatagggagattaagaagcagagccctcacatagggcatttcacaaaggatgtggcaaggcggtcttatgacagtgatttgattgttgatggctaccaagactacatcgacgaagctgtgtggatgaagggagagtatgacttcaagttgggtaatctgatggagcactatggaataaaaagcgaggctgagataataagtggatgtattcttaagatggcgaagaattttaccaagagtagtgacgccgatgctattagacaggcggtgaaatcattgcggaaggaagcaaggtcatggttcagcgagatgaacgccagtgagagcggggatgttcctgaagccttgtatgccaaggcatccgcttggtatcatgttacctatcaccccgagtactggggttgttacaatgaagtatatggtcggccacacctcatcagctttccatgtgcttggtgcattgaaatgaatggaggatccaaatttagagattgtgagactgctgataactggtggtccggttcagaagagaaaagtactgaaaccacaaatagcgattcaactgatatggtctcgggtgtacttaacatgcttcagaaggtggtctcgttgagaaatgcaatgccatga

SEQ ID NO: 965 - DNA, 510 bp, Triticum aestivum
  source 1..510: mol_type = genomic DNA
atggcctccaaccagaaccaggcgagctacgcggccggcgagaccaaggcccgcactgaggagaagaccgggcagatgatggacaaggcggggcaggccacggaggccaccaagcagaaggccggagaggccaaggacaagacggcccagacggcgcaggcggccaaggaccgcgccgccgagagcaaggaccagaccggcagcttcctcggcgagaagacggaggcggccaagcagaagaccgccgaggcaaccgatgcggccaagcagaaggcgtcggagacggcccagtacgcgcaggagaggtcctccgacgcggcgcagtacaccaaggagtccgccgtggccggcaaggacaagaccggcagcgtgctccagcaggccggcgagacggtggtgagcgccgtggtgggcgccaaggacgccgtggcgaacacgctgggcatgggcggcgacaacaccaacaccgccaaggacagcaccaccgagaagatcactagggatcactag

SEQ ID NO: 966 - DNA, 7949 bp, Triticum urartu
  source 1..7949: mol_type = genomic DNA
ctttcataagtggtttccatgaagttttctttgaaacttggcttccatgtgatattctctccaacccattttggggcatctagtactccctctgtaaactaatataagagcatttagataactaaagtagtgatctaaacgctcttatagtagtttacagagggagtaattaccaatgaaatatcacctttgtcccaaattacttgtcttagatttgtctagatatggatgtatctagacacgtttagtgttggatacacctgtatctagacaaatctaagacaagtaatttgggacggagggagtataataaagcaataaagaggtataattcatctatgaggtatatgagaagcggatcatactacccggagtttagaatgatttttgtatgcatatatatgtgtgcttttgcgtgcgtgtgtgtattacgtgcctactctatagattaatatagctcactattttctcattttgctatggcaaaataagtattatatcaaaacaacaacatctagcatagattatgcgatagccagctacagctgcaatatttccaattgaatattcctacccctgaatgccatggaccacattttaaaaccttatttattgtgattgttaatttacaatctgaatctgtttaacatttgtcagcagtttttttttactatgttatggccgcatgttaacctagccttcttgttttcattgatataagcgtagttttacttcctattaatatagttcatatttttattgtttgtgccctgtcaaccttatgttaggataacttgatcagttagcaatagtcttatgcaattttttacagcttatcttctactccctctgtcccaaaaataagtgtcttgagacacttattttgggacggagggagtatttctgtaatattatgttgcacgatttcctttatgccctttgtgccttgctttggccctacaagcatcagttatgccaacttttaaccgaaaattttattgctgtcttctttacaaattatagtaatgtgtacccaaaccctattgtgcatcacccattccatttctttttctttttaagacttgactaataccatgtcttggttgataagctgctcctgtttgtgaggtagaagtatatgcgataagaggatacagtcaaattgtaggtgttggattacatgtttagactatgtgatgtcgtatatgcacttcctagagtgtaaattgagaaatgcacccattccgtttctcttgttaggtttatgcttgattctaatattccatcattctacatgaagttatacttgatactccctccgtccgaaaaaacttgtccaaagcttgtctctcaaatggatgtatctagcactaaattgatgctagatacattcatttgagggacaagctttttcgcacggagggattatgtattagtcttgatactttacattctcatgatcttacattttggtgctctcttgtcttagcagcggccatcatggttaggaagaaaagaactggtcctggcagccctggagagagttctggggaagcttccggagcttctgggcagggttcctcgcagcgagcagagagagctcctcaacagcatggtggaggacgtggtttggcacctcaacagcatggccgtggtggggggcaacagcagggccgcggtgggcactatcagggccatggaggatcagcttcacactatccaggtggtggcccacctgaatatcaacagcgtgactatcaggggcggggacatccaggtggtggtccacctgaatatcaacatcgtgactatcaggggcgtggacatccggggggtggcccacctgaatatcaaccacgtgactatcaggggcgtggacatccggggggtggcccaactgaatatcaaccacgtgactatcagggacgtggtggtccgtgccccagaggtggagtgccgcagccatactatggcgggcataggggaggtagtgctggacgtaacgttcctccaggtccatcaagaacagttcccgaactgcaccaagccccgcatgtccaatatcaagccccggtggtttcaccatccgcatcgggagctggctcatcctctcagcctgtgtcagaggtgagcagtggacaagtccagcaacagtttcagaaacttgcgattgttgatcaaagttcaacaagccaatccagtcaactggcaccagcatcaagcaaatcagttagatttccattgcgccctggaaagggtacacatggagataggtgtgtcgtgaaggcaaaccatttctttgctgagctccctgataaagaccttcaccaatatgatgtatgccctttacatgaagttctttttccccactgcagtttttattttgtaatttttgatcgacaatcttgttttgtcaggtctccataactccagagattacatcacgtggtgtcaatcgtgctgtgatggcagaacttgttaggctctatagacattctcaattggatggacgcctacctgcgtatgatggaaggaagagcctatatacagctgggccattgccatttccttcaaagacatttgaaattactctgcatgacgaagaagaaagccttgttggtggtcaagtcgcaccaaggtatgctgttgctgtgacatttgtacttcattgtgttcatagtagttctgtactgacattccttttgttttaaggcatgagagacaattcagggtggtgatcaaatttgctgctcgtgctgatctccaccatttggctatgtttctagctggaaggcaacccgatgcacctcaagaagctcttcaggtgcttgacattgtgctgcgtgaactgcctactgccaggtatcctttagcaaaccatgtcttgttttattgtttttctggctgtatgggttataatttccatgtgtttttcttctgtaggtattctccagttggccgatcattttattctccaaacttagggagacgtcagaaacttggtgatggtttggaaagctggcgtggattttaccaaagtataagacctacacagatggggctttcgctgaatattggttagatatccctctcatgtttttttttacctctgtgtcactgttcatttgttgttttgttagttgtgatgaacggtgggtggcccaaagtaatactcccgccgtcccaaaataagtgtcgctgatttagtataaagttagtacaaagttgtactaaatcaacgacacttattttgggacggagggagtacataacgttccactttacagagcatcttagtggaggttacatattgggagtggtcttgctgacataatgatttatatgatgtttattcttgcagatatgtcttctactgcatttattgagcctcttcctgtgattgattttgttgctcagcttctgagcagagacatctcagttagacccttatctgattcagatcgtgtgaaggtttgattcaccacttgtttcactgtttttaacggacttgctttatgcagagttaccataattacccccccccccctcctgcagattaaaaaagccctaagaggtgtaaaggttgaggttacacatcgaggaaacatgcgtaggaaataccgtatatctggactaacttcacaagcaacacgagagctatcgtatgtgcttcttccctcgctttatacaccgaaatctttatgctcttgtacgttcgtgggtgatttgatttcctgttggtttcatgtggtagattccctgttgatgatcgtggtactgtgaagactgtggtgcaatacttcctggagacttatggttttaatattcagcacaccactctaccttgcttgcaagtgggcaatcagcaaaggcctaattatcttcctatggaggttactatcttgaacaatcttgcttgcattgatttgaaaatgatatgctcatctatgtgctacatccagtctcagcatcttgtcgagttgttcaatgagtttatcactctgaaatatcaggtttgtaagattgttgaaggacaacgttactcgaaacgactgaatgagaaacagataactgctctactgaaagtgacttgccagcgccctcaagagcgtgagaaggacatcttgcaggtgattgttcattatattatttctgatgcaagctgttataactgctgttacaaaattgccttatgacatgctgtgcctatcacttgctattttttgtgcggtgctgcttggcgttctcctcagtttgacaaaaaatttccacttcgatgtattcaatccacactattgcaatcaaataatctataaagttataaagttcttggaattcctccacaagcatgttttacaagatgatagttgtttgatgagatttttgttaaggccaaaaccataatttttgggaagacaactatctatgaggctatgacctatgagccatttatctgaactgttcttttgtctgtattattcatacacactagtacactacccaccgattcactctaatctgcaccagctttatacatttaaactggactatctaaatctcttctctcgcttttcatatttgaccagacagtgcatcacaatgcatactatgaagatccatatgcacaggaatttggcataaaaattgatgagcgacttgcatcggttgaagctcgtgttctgcctccgccaagagtaagtctattcagacttgattagacagcagttgacttaccatattggacatacgttgtgcgtagcaactgactacaccttttttattagcttaaataccacgatagtggcagagagaaggatgtcttgcccaggatcggccaatggaacatgatgaacaaggtacaccttgataaaatgtcaccagaaattaaaatattactcccaccgtcccaagattcttgttatagatttttttagatacggatgtatctagtcacgttttagtgttagatacatccgcatctagacaaatctaagacaagaattttgggacggaggtaatatcatttttgtaaaggccttcagctacctgtttccataccgggaacagtagtggagaatcgtactgcaagaaatttggaacaaaattatgctagatagataaaataacatacagtacctagattgtctgcttctttgcaacacacaactttgctaaatactacactaaggagttttattgatgctatttaacttcatattcttgcgttcatttcttcacatttcctgaagaccgtctagtttcacatgtgaacattttaagagtctgcatgatttaccttaaccaaccatatactattttggttggtatctctctgatgttagcatttcttaaacctagacctacatctactttctactccctccgttcctaaatacttgtctttctaggcatttcaacaagtgactacatacggagcaaaatgagtgaatctacgttctaaaatatgtctacatacatctgtatgtagtagtcatttgaaatgtctagaaagacaaatatttaggaacggagggagtaggtactagtggctgtagttttactgcatatccccccttttgtcttgttagtcttgttatgttttatgtagttctgatatgtgttcattttcattggtagaaaatggtgaacggtggtagggtcagtcactgggcatgtataaacttctctcggaatgtgcaagatagtgctgccaggggtttttgccatgagcttgctataatgtgccaaatatctggaatggtatgatcgagtcatcaaactagctttccataatatatctgttcacttctcttatgttgtattctctggtgttaaaattcttactttctctctctttcttaggactttgcacctgaacctgtgctgcccccacttactgcgagacctgaacatgtagaaagagcactaaaggcgcgttatcaagatgccatgaatataatcagaccccagggaagagaacttgacctgctaattgtaatactgcctgacaataatggttctctttatggtatgatctcttccaaacaacatttaaagattgcctggatgatatttttgcttattatctttctttccctcccaggggacctcaaaaggatttgcgagactgatcttggattggtatctcagtgttgtctgacaaaacatgtttttaagatgagcaagcagtatcttgcaaatgtagctctgaagattaatgttaaggtatttcgctgtgcttcaaccattccatctttattgtgcacctcggttgttatatgtttacctactttttaggtgggtggaaggaatactgtacttgtggatgccttgacaaggaggattccccttgtcagtgacagaccaacaataatatttggtgctgatgttacacaccctcatcctggagaagattccagtccttccattgctgctgtaagtgacttattgctactatgaatttttttgaagttctgctatgatacaatggacctgctaggtgtactggaagctaatcgcgtgcaatattctttccttcaggtggttgcttcccaagactggcctgaggtcactaagtatgcaggattagttagcgcccaagcccataggcaagagttgatacaggatcttttcaaagtatggcaagatccccaaagaggaactgtgactggtggcatgatcaagtacgatctttgtaatctcatgatacacatcactcctctagtatctattgctgctaacagtgtaaattctgttaaattgcagggagcttctcatttctttcaagagggcaactggacagaaaccccagagaatcatattttacaggttcttatccttgcttgggcatgtttggtaaacacaattgtctgttattaaacaattagtattttcagggatggtgtcagcgagggacagttctatcaagttcttttgtatgaacttgatgccattagaaaggtagaattgcttcgttcatgcttttttcttgataaactctgaccagccacacttgtttggcaatactcagcatatatctctaactgttatttcttaactacatgtaggcatgtgcgtccttggagcccaattaccagcctccagttacttttgtagtcgtccagaagcgtcatcacaccaggctttttgctaataaccacaatgatcagcgtactgttgatagaagcggaaacatactgcctggttagttgtttgtacacacaagctgttttctgctttgctactcaattccgaatctgacgattgtggaatggacctctatctatttctaggcactgttgttgattcaaagatttgccatccgaccgagttcgatttctacttgtgtagccacgctggcattcaggttggtactttatttgcagtctgcattttgtcgaatttctgattgctgatttacctcttaattcctttcagggaacaagccgtcctgctcattatcacgttctatgggacgagaacaaattcactgctgatgagttgcaaactctaacaaacaacttgtgctacacgtaatttactgtcttgaacttttttagtttaaaatgttctgtttaactggccccaactgaagacaatctctactgtttcaggtatgctaggtgcacccgctctgtatcaattggtaagtcacaatacgattctcacgctatcagtgttgcgtaaaacttgcgttgcactaccaatgtttgaaaatttgactctgactattgcgtttgcttgcagtgcccccggcatattatgctcatttggcagccttccgggctcggttttacatggaaccggatacctctgacagtgggtccatggcaagcggtgcccgtggccctccacagggtggacgcaataccaggccgtttgggaacgttgctgtcaggcccctccccgccctgaaagaaaacgtgaagcgggtcatgttttactgttaa

SEQ ID NO: 967 - DNA, 7663 bp, Triticum urartu
  source 1..7663: mol_type = genomic DNA
tcgtttttacgttgtccgcgctagcttgctcgtagatctaccagtatacgattgtgatggtgcagttttctcccgctctgctttcgtttttctccatgcgacgtgcgtctccgaccccatccatccatccatggatgcttggtcgagcgctgtcgctacacgtagtgacgcctcggtgcttctctcttttgccgttataaaatctttgcgttttctcccgctacatgcatggatggttttctcctgttctcatgcatgaacagtgagttcttggaatgcaaaagccatcctgcagacagtagctatcgcttcttgtttcgtcgctgtcgttgttatcttggaaactagcagcagtagatgtagacattatttcggcaactttgcggtcaaggctgcagattcttgggatccgttttggctatagacggcagggggtcgccgtgagatcccgtcccatgcaaagccacgtacctttttctttctttgattcatctcctgtgtcttttcccggcgttcttcttttgtgaaagtgttttcggggatggtcttggtcttgtggtttccgtctggtccttgtcctcgttcggggacagaagggcaaagcaacgaacgtaccatccgtccgttgggacatggcagacgcatccgtccgtccgtgtacgtgtctttcatacattttgggcaaagcaggaggcctgttggtgttgttgcccttgccacctttgtttgtgattcctctggctctgccctgcctgcatgcatgaggtcccgcggcagcttttggttttgtctttggttcaaagcatgcaacgccgaggccgtgctcggatctcctgtgtcgcgcacctcgagcgcaattccgtgtggctctctgtgtttgcatctagtccgtcaactttcttttttgggagagattcttttccccctctcggtccagccttggacgtttcctctttgtgtatgtatgtgggtggaacaacagtggtggatctgtttttttttcgctgaatggtcgacacgtacggggatttaaatattagtactgtttttgacgtgaggtttaatattattgtttttcagctttttacagtgagctctattttgctttaaaatctcattctctgctcatacatgtatatgcgtacctcctttgttgccaaactattttatattccaaatgcaaaaaaactactttatattcgtctagtacatttatatatggtaaattgacgacaaattattttgctactcctcgtaacaagtacccctacagtatctggtatacagtccgtagttcctttcccttttttaagtacatatatacagttcgatgcaaaaaaaaagtacatatatacagtacgcaggtccttttttttactagacgcagtacgcaggtcaggtccttttttctatactatacacacggtacacaggtccgcttattgtattcctgtaccgcatgattgcaccaagattcgtgccctcgcacccacccccaccatgccgtcgcagcctcccactcaacccctcctcacccggacggagcgccgccgccccttctccgcctccggcctgctcgcccgcggcccgtcaggaaccctagcatggccgtgccagaaaattactctactgtgctgtgcccccttgagtattgggagttcgatttgggatccagacttcttcccccacttgattgactctatactacagggcttcttccgtttcaactggatttttttctggtctcagtaagtcgaaatggaggccggcacatggtatgtcttgccgtttgcctgctacatttccagtcctgcgatgccactagcagctaatttcgtttattgcctaattttggtttactggtttcttaagatccgctagtttttcttttccctcacagattgaatgaagtatagcataagtactgagaattaaaatatttcatttgattttttttaaattcattggacactaatcagagggctaatcgtctctattctgtgtactgaatgtagaacagagtctctcttgtttgtgcatacatactgatgttgaaatgtgttgctgtaggtctccattaacccggagtcaaaatcaagggctgtgaacagggaggtactcagtgagctaatcaagttgcacggcaagacatcccttgggggcaaattgcctgcctacgatggaagaaagagtctttacactgcaggctcactcccttttgagtctgaggagttttctgttacactggttgatcccgaaaagaaagacaaagaaaagtatgattggattctttaccttcaatcttgtccaacttgattacccattgtatttgttttttagctactgacttgttccctcttcatttgcagggctgaaagggagtacaagatcaccattcggattgctgggaggacagacctgtaccacctccagcagttcctcaaaggaagacagagggatatgcctcaagaaaccatccaagttcttgatgttgtcctcagggagtcaccatcctggaagtatgacatccactttccagcagtttattgccatcagtttttcttgatcatactaactagttctctagagccctaacactattgcacttttttcattgcagctatgtcacagtgtccagatccttcttctccaccacctttggtcacagaggagacattggtgaaggattagagtgctggagaggttactaccagagcttacgtccaacccagatggggctgtcactcaatataggtactcccctcccctcccctgtctgttactgttactgttttccgattgcagtgtgtcctagccttgtttatctgatgatctgcacttcatttttcagacatatctgcgacatccttcttcaagcctgtgacagtggtccagtttgtgctagagttcctcaacttacgtgatgcctcgcggcctctgacagacagggaccgtgttaaggtactattcgtctatgctaagctagttttagaattcatgttctgtagattgcaccatgttattgtcttgaaatagttgactaatctcattgtatgcactgtatgcagataaagaaagcactccgtggggtgcgtgtcgaaacaaaccaccaggaagaccaaatccgaagatacaagataacagggattactcctgttcccatgagccagctcatgtaaataacttccctcaaatgctataatattttccattatgtattttctctctatgttctggtccaactaatcagggttgctggaatattaaaaagatgtgtagttgtatagatttttggcttattgcatcttcattgatgttggtgtgtcaggaactggttaggggattaattttgtttacaacattcttcctgtggcatatgcttttgatttctgcagcatagcaagatctgtttgtgccaaattgtttcctgttcacagttttccttaggaatgtctagaccacagttaactttttagcatctatccatgattgttattccctttctaatagcactctactcatgttgttttgtttgttgttagatttcctgttgatgagagaggaacaagaatgtcagttgttcagtacttcatgcaaagatacaaatacaatctgcagtatacttcttggccctgcttgcagtctggaagtgatgctcggcctgtgtatctgcctatggaggtattgtgtccatgcctgcttcgtcatatttgaattatgcattgtttgctcatggttctctacaaattgattgtaggcgtgcaagattgttgaagggcaaaggtactctaagaaattgaatgacaagcaggtcaccaacatacttagagctacctgtcaacgtccccagcagagggagcaaagcattcgtgaggtatgtacctgttgtcaactgcattctggaaatacctgcccatgtcttctcgcatgtggtagttcattccaatctgttcgaactcatgtagttaggaatgtccttttcaaggcatatttgtcatgtttgcctgtaatgtgtagtctttctcatgacactctttttcacactgtagatggttctgcacaacaagtatgctgaggacaagtttgctcaggagttcgggatcaatgtctgcagtgaccttgtctctgttccagcccgtgtgctgcctccccccatggtaagaatgctgtatttccctcctttctctgagctgcttcactagaaggatttgtagtaatcacatcctttctatgtgtttcagttgagatatcatgattctggaaaggagaaaacttgtgcgccaagtgttggacagtggaacatgattaacaaggtatttccctgttcattgtcttcactcccaattttactatgcattactttttcttggaactaaatacatggagaacctgttgtgtttcttctttgtttgttgttaatgtcttggacaggtcattattttgtactgtatgtagcaactcaaattattttgcttgattgcattttattgatcatgtagttttcacactagttacttaaattgagaaacagttgagcttgtctgtgactttgctcgtcattttgtatgtagtatatcgatgatggtacaaatgataggtctcatttgagtttttttactgcagaaaatgatcaatggaggaatcatagacaactgggcctgtgtgagtttttcacgcatgcgtcctgaggaggtatacaggttctgttgtgatctgattcagatgtgcaatatgactggaatggtaaaaggcttgcattgctttcctgtttctcaggcatttatgatttatgtgtgtatgttatagctgactgacttgtgttttccaaccctgtagtctgtcaatccaaggccacttgtagacaaccgatcagctagccccaaccacatcgagaatgccttgagggatgtatacaggaggaccaccgaaatgcttggaaaacagggaagcgaaaaacagctacaactgttaattgtaatcctacctgaagtcagtggttcttatggtatgcatatggctcctctggttaatccccttccaccttctcttggatttctgtagatttatgtgtgtgccacatttaattttgcagggaaaatcaagaaggtttgtgagactgaccttgggatcgtgtctcagtgttgcctgccaaggcatgcttccagaccgaacaagcaatatttggagaatgttgcactcaaaatcaatgtgaaggtaacataaccacctggtctatgttttacattcagtttccatggaatgttgattcattgtctacttcggtttctgttgaatgtgataattctgtgtcttgactaggtcggaggacgcaacacagttctggagagagcttttgtgcgaaatggcataccgtttgtgtccgaagtcccaacaatcatctttggtgctgatgttacacaccccccacctggagaggactctgcatcatcaattgctgcggttagttcttccccgtagctaacagtttgtcaactcgttatttgtttctttctgattttatctttcaaatggaattatcatcttgatgcacatacctgttgagtacaaataggcttaaccgtttcttatattggattgatgtaggtggtggcatcaatggactggccagagatcaccaagtacagaggtcttgtctctgcccaaccacacaggcaggagataatcgaagacctcttcagtgtcaccaaagatccgcagaggggtaatgtcaatggtggcatgatcaggtgagttttgtgattagtcagagacgattgctagcaattgccctgtggatcaactgcgaacctgacataattttctctacagggagttgctgattgccttccgcaggaagacaggccttaggcctgagaggatactcttctacaggtgcgtgcacaaattcatgatactcttttcatcctgtccattcaatggaactgcctgaccgatcattctcatgtacagggatggcgtaagtgaaggccaattcagccatgttctgcttcatgaaatggacgcaatcaggaaggtaagcctgcagcatatgataacgtgcaaatatctgttttgtctacctcttctgatgttatccttggcttttctcattctgatggttcttaattttgctgttgcaaggcctgcgcctcgttagaggaggggtatatgcccccagtcacctttgtggttgtccagaaaaggcatcacaccaggctattccctgaggttcatgggaggcgtgatatgaccgacaagagtgggaacatacttccaggttagcaaatacactggtatttcaatgtcactgatttacacctatctgctacttgttgaaacattgctgactgtgattgggtgcatttctgtttctgttgtcctgcaggaactgtggttgacctcatgatttgccaccctacggagtttgatttctacttgtgcagccatgctggcattcaggtagacactttgtccacatgtccatttgttcctatgcagcttatcttcagtgcttgcatactgagtgtgtttgcaaaatgctcctcagggaactagcaggccaacacactaccatgttctttatgatgagaatcacttcacagccgatgcgcttcagtcactgaccaacaatctctgctacacgtaatcccctctcttccgctctctcttaatctctctgttgtgttatgactctgatgatggtttaattatgatccatatgcagctatgctcgttgcactcgtgcggtctctgttggtgagttccctttttcagttttctgccttgatttgcttcaactttcatctgtactttttctctccaagtagagcattcttctgtgggcattaatactagtagactaggggcatcatctgccttatgcctctgctattaaattattatgttttgcttatcctgatagtcctagcagctgcagacttgtactgtatttggcattagtattaccttgtacccgcctgtgtgtgccactgtgccttctctgatgcaagttagcaatccaaccacactggtttctttaactccttaatggatctgtgcttgagggcctttggtctaaaactctaaataagcatgtactcctgacaaaatgaacctgagtttatagatgaatacaccgagtagtttcattcctttgctagtttattgatgaatacactgagtagtttgcattcctctgctagtttattgatgaacacactgagtagtttcattcctttgttctgtgtcatctatatatgtttacattgaaatcaaccctctgctagtttattgatgaacacactgagtagtttccattccttcgttctgtgtcatctatgtttacattgaaatgaacaacacagcatctttcccccttgctgttttaagacttggtaacctagctgttgttctatttatacaacctgtggcatttacttccagaagaagctaacttggctgaacttgctatgcagtcccaccggcctactacgcccatcttgccgcattccgtgcgcgctactacgtggaaggggacagctcggacggcggatcgacccccggaagcagcggtcaggcggcgattgcgcgtgagggccctgtggaggtgcgccagctcccaaagatcaaggacaacgtcaaggacgtcatgttctactgctga

SEQ ID NO: 968 - DNA, 11324 bp, Triticum urartu
  source 1..11324: mol_type = genomic DNA
ggcgtgcgtcgtggttgaggccgccggatcgacaagcggggtaaccacatgagggtcaccagcgcttgcaacacccaatagtgcgctcatctcctccgccttagcacataatctctttagataccacaacaactgctcattggcagacatggtatcccacttcagtggtaagtcggcaggcatggcgtcatcgtcggtggaacagatgaattggcgtggaagaaaaaatgagaaaaattagatggtggaaggatggtggcctggctttgaataccagatgttagggactagctgtagtcttgctagtaatctctctctctcaggaaggtttgatacagagtagcaattacaaccagaggttacaagcgaattgggggagaacatggaagaactggaggtaggggaaggtagccgccgccaagccgtccgtgatccactggataagttgtgtgttgcttttgcccacatacttgtggctgcagcggccagaggactcccagccgggccaggcccatgtgatgtccagaggcaagcttatatgggctaggggagagccctgacaaaaacatggtttaattgcttgggatccggcaaaacgcaagggcgggggaaacgggaaaatttgggttttcgctgccccttaagttgtgtgttgcttttgcccacatacttgtggctgcagcggccagaggactcccagccgggccaggcccatgtgatgtccagaggcaagcttatatgggctaggggagagccctgacaaaaacatggtttaattgcttgggatccggcaaaacgcaagggcgggggaaacgggaaaatttgggttttcgctgcccctcccgccaagcaaacgcgcccagtcccgcgtgcgccgcgcggccaaaacctcaaaaaacccttcccaccctttgccccgcctcacgcacgccgcgtcgcaattctctcgctcgcgttcgtcacccctccgctataaatcccgccaccacgcgaccgaaacccccctccccccctcggatccgctccttcggcctcgttcccccgtcgcctccgccgccgccggcgaggaggccgaataggtaaccctggggcttcgttttttcttcttctcggtcctgtttttaccgtgcctgcggattgattagttcggggtggtgtttaggggcgcgcgtgctccgatagtccctgggctccgtgctgtttgaccgacgattcgtttgcgctgctgctctggctccgcatccaggcggggttgatggattccttcggttcgttgtggatttatcagtgacggttttctagtggaaacatttttgccttgcctgctgttctagttctgtattccgctgcggatttctttgatttctgtaccatctactggaggtgattccggaaaggttgtcggtgtgttgccgcaacgcagagcagagttaacggaatggcgaccgttccctctgtaaccgcgcctgcccctatttgggccatttccgccgtatttcctcccgtgtatcatactcatctcttcggatgtgcgtcgtgggggcttagcttgctggtctgtggtgcggaagtagctccatctgtgattgttcgctgtgcttagctccggggagccctgtgcgtctgcctatccatatagttagtttgtttgatgtgttctgtgtagggggttaggagactattttcagaaatccgttggtctgcttgagcagtggtggttcatgacttgattattgcagttcctaccaaaaaaacccaccgttttcttcaatagttctgcgcctcccccaaattggttaaacttctgtttaagtagatatccccccaccggtgttgaagtttctgatgtttttttttgatcgtgctgcattgcaggagtacttgcatacttagtggatccgtgcttggtggcattgagattcaccgcaaatcttctgtagccttaatttgccttgactgcctgcagctggtgatttttgttcttgagtatcctaggtatgtgtcactaattccatgcctatttgaatgaatgaattaactagaaggcttcagctctgttcattttgtttatggctccactcctgtgacaaacatctgttaatcaagctctgatgtgtcctatggccggtgatgcaattttaggaacagttcattaccttactgttgaattagttaatttgcttacttgtagttgttaataaggtcttgtaatggaatatagacttgcttttagcatgtcttctgaagtttcttgctatctttgtgtagaggagctatatatctacatggattagcacacagttttcaaggggcacctggtgctgctagccttgcttttgctttatttggtggcttggtgcaaccacctgtgctgatagttttggtgcacctttcttcatttgcctattcttagcttattacttggggatcttttgagaattgccatgctgagtgctacttccccagttgcttactcacggttacactggtttcatgctagttttagcatttgccaatgttttcatgtttgtgaaccaattatagtgtgatgtaataatgagatgttagtgccatgattgtttacttttgatttggaagacatgggtttaatgatggctatgttgtttcctaccccctattgttgctagaggttgaggtctactcatagattatcattcccaaaggcaaaatcaagttgtctaaatcagttaaaggaattggatacaggttcaacagattgttgatgtgtatgtttcttattcattaccttttgcttctgcttccaatttggaattgatcttctacatgttgcggggttggctctataacatgtctagtgattttgatgaagtgtgttgctctgttaatcttttcatgtaattaagtttggattggaagtaagtactgtattttcttgctaattgttgatgaggctgactaattctgaattttacagggatatatcaaatatggtgaaaagtccacgttctccagttaccacaggtattgttcttaattacttctattgttacttgttttgcatgactacagtagtcacctttccaatctatagcatggttatatctgtttccaggaatgtgtaatatgatatactcaatgctatcagggtattttccgtgtgcatctgctttgaaaatgtgaatttcaaatgttgtctgactcttgttttatgtttaatgtgttacatgttggtatattctactaggcactgcaaagaaagttatgacatttctttagaaaaaactaatgctttacccttttaaaacaagtattctgctttgcgttcatatataacagtgcaaaggagcaaattatatgctgacatagacatgtcatatgtgctaatgtttctgtgatgctcactagctagacatggcataagcaaagttggtttcttgccatgaattaaccagtattgacttttgtattagatttgtataaaatattaatctgtatccttattgagtgtctgggcagtcttctagtttgtctaatgtgtcttatatggagctttgactcaaactggatagacatcaagagggagatcgcaaaccacgtacccattgctatcactgctctccattgctgactccacttcctatgttatcactaaaatgaagacagacattgtggtacatgcacaagtctgcccttcattgttaaagttgaatggctggggaggaagatgatgtagatagattgtttggttgttattgagatgatggaaattgtggagctgtggtgttgagagggtgaggcgcattatgccatgaattgcgtgtggtggataggtgccaatgctttccttttcctctttttctgtgccctcccaggtttggttgatctatttgcatattagttatctagtatgtgctgcaacttgctttaactaggtgttttgatagcaatcataatgctaatgcatacatgtgaagatgagtgtattttaggattgtaggatgaagggtggaataagctactgtccatgtttagtatgcaaaatagataatgacctaaatctctgggaagaaaagttgtctagtttggcatccacatgttgattttcttcccattgctcacctgcgtgtgcatgatactgatcgaggtccttaggttatactgatatttacatggcattagtccagttggttatgagatgccattttttgctgaatgttgagttgttgacaatgcagcttcacacatcacacataaaacaagaaaaccattttttaaacataatttttaatactaacatacatgcaacattttgtataaatcatcaatattttaatggcacacacatactgtttgcagcataaaatcctttatacttatgctttacttggagtggtatgaacacttggagcatggattggtttgactcatatcacagtactacaaaaatatgattgtgtttttctgcaagaaaatatgattttgtttgactcgtatatccagtcgtagtctgttgaatgtgcttttacttttatcaacctagtgccttgactgtgaaactaaattcaagatataaatgaggtcacttatcttgtgtccatgctagtgttccttggaagagagaaacagttgtgaaagtaatgcctggttctgtacagttgcccttctaatgagaacttatttctagatgaacttaatttgaacccccaagtacatgaataacagggtcaggtgatcaatgtatgtatgtaggtgcacacttaaatcctgtgtatgaagatccatgtaacctcaacaagccatcatgcatgaagatccacttctgtgcactttttatatacgttactggattcaagactgcttttaatgctatagatcatcagcatatttctaattccccttcttgttaattgcctatatgcatatggcttatgcttcatggtgtttgattggtttttattaatcaatttaatgatctaattctgaagtttcatcaagaatcggtcttgtggctatttaagttccctgaaaaggttaagtgtcatggtctttgttttcaagatgagcctctgatatcacctagtgacttgtgtatttttatcagataaaagagctacaagttgcaactgcaattttcactgcaggggttacaccaggaaaacacaaaattaaccatataatataaatatagatataaatgaggctttttttgtgccatctgatcttggtgtctgggcgatatctacaattttgcttgtgtgtgtctcgccatagatcttgttggagctttgtttaatgatagctggcagcaactgcctgtaacttatacagtgaacatctgttctgtttcttcataccaattggcagttggcacccctagcactttcctttttgttaggaaggagatccatctatataatattagtttccaagaaatacacaaaaggcttgaatgccatttcatgaaaaagaatatcaaagaggtttctgcatgcctcattgaggctaagcaatcatctcctaacacctgtcttcttgtgtctgctgagtgctggcatcgttgccagtcaagcttgtggaaggcagccaagtctaggctggccagctctcatgcctaccagttatggacccaatcccattgctgtaacacctgagtgctgtgtcattgtattattgatgccttttcactgttcatcatttagtttctttcttttgttcctgatttagttattttatctgaatgatggcctttcaggaacaaaaaggtgcagagcaaagccacaaaagaagggtgaagaattcactgcacaaggaaaattggtggatgggcctcaggatgcaacaaatggtgttgaaaagggtgctggttctgctactcacaagaggccaaggagggcagcagcctgttctgattttaaggagaaatctgtacgtttatcagaaaaaacttctgttgtcaagatcaagaaaaatcggatggaagaggaagaaatagatgcaatcaacctgacaaaattagggccagaagattcgccgccttgccggaagttgattgatttcatcttgcatgatgcagatgggaatctgcagccatttgaaatgtctgaaatagatgattttttcataacagctctcatcatgcctatggatgatgatctagaaaaagagcgtgaaagaggtgtacgctgtgaaggatttgggcgtattgaggactgggcaatatctggttatgatgaaggtactgcagtggtctggctctcgacagaacttgctgattatgaatgtgtgaaaccagcaagcaactacaagtcttactacaaccacttctatgagaaggcacaggtatgtgttgaagtctacaggaagctcatgagatcagtaggtgggaatcctaacatgagtctggaagaattgcttgctagtgttgttcgctctgttaatgctatccaaggttacactggaacaatgagcaaagaattcatgattgccactggtgagtttgtatacaaccagctcattggtttggatcagacggcaggcaatgatgatgagaagcttgttacattgccagttcttcttgctctaagagatgagtgcaaatctcgagcagaatttaccaagatgccacttagcatttcaaatgggagcctgaagatcaaggatattgagtgtaaagaggtagctgaggacgatgatgagaaattagcaagattattgcatgaagaagaagaatggaagatgatgaagaaacagaggggtaaccgtggagtcccttcccagaaaaatgtctacatcaaaattagtgaagctgagattgcaaatgactaccctctgcctgcatactataaaccatctagccaggaaatggatgaatacatatttgatagtgaggatggcatgttctctggtgatgtgccagtaagaatcctcaataactgggctctatacaatgcagattctaggcttatttctctggaattaatccctatgaagtcaggcgcagaaaatgacatagttgtctttggatctggttttatgagagaggatgatggcagttgctgttccacagctgagtctgcaaagttgtcttcttcatcaagtaaagctgataatcaggatgtaggagttccaatatatttgagcccaatcaaggaatgggttatagaatttggtggctcgatggtttgcataaccattcgaactgatgttgcttggtgagtaccccagtcagtttttactgctattttattgtgtaatcttcatgccactgcctgttcagtattcttttcactgaatcctctcattcctttaccccagtctttatttgtttctgtcggcactccattagaacttacattgcatgtattttcaggtacaagctacggcagccaataaagcaatatgctccttggtgtgaacctgtactgaaaacagcaaggcttgctgttagcatcatcaccctgctaaaagagcaaagccgtgcttcaaagctttcttttgctgatgtcatcaagaaagtggcagagtttgacaaagagaatcctgcctttatatcgtccaatattgtactggttgagaggtacattgtggtacatggacagatcatacttcagcagtttgcagatttccctgatgagacaattcgacgtagtgcttttgccactggcctgttgatgaagatggagcagagaagacatacaaagttgttcatgaagaaaaaggctcaagtaacaagaggagagaatctgaatccaattgcaacaatgggaacatcatcaaaaagaaaagcaatgcgtgcaaccacaacaagattgatcaacagaatatggagtgattactatgcacaccatttccctgaagatttgaaggagggagatggaaacgaagcaaaagaagttgatgatgaacaagaagaaaatgaagatgatgatgctgaggaagaggtacagattgaagaagacaaggttgcaaagactccaccatcaacacggtctcgaaaattggtatcacaaactagcaaagaaatgagatggaagggtgatccagctgggaaaacaacttctggagaagctttatacaaatgtgcgtatgcacgggaactcagaatagatgtcggaggggcagtcacactggaagatgattctggagaaatagtcatatgctttgttgagtacatgtttcagaaatctgatggtgcaaaaatggttcatggaaggattctgcaaaaaggctcagaaactgttcttggcaatgctgcaaatgaaagggacattttcttaactaatgactgtttggagtttgaactaaaggacatcaaagaattggtctctgtcaatctccaatcaatgccttggggtcacaagtatagaaaagagaattctgaagctgagaagattgagtgggccaaagtggaagagaggaaaaagaagggtctgcccatggaatatttatgtagaagcctgtactggcctgagaagggtgccttcttctctctacctcgtgataaactgggtcttggtaatggtgtctgtggctcttgtgagcacagagaaccggactgtgatgaattaagaatacttaccaagaccagcttcatttacagaaaggtaacctatagtgtccatgacttcttatacattaggcctgagtttttctcccaagaggaggatcgtggcacctacaaggcaggaagaaacattggcctgaagccctatgcagtttgccatcttttggatgtctgtggacctgctggttctaaaaaagttgaccctgcatcaacaaaagtcagtgttcgaagattttatagaccagatgacatttcaactgctaaagcttatacatctgatatcagagaggttatactcttcttcctctatatatttgttttatgtctgatatctgtaataccatcattagttccatgcttcataacatgccaaagttttgtgatcattctccttaaatagtcttcaatacatattgttaacctttttttgcttgattcaggtatactatagtgaagatataattaatgtgccggtggatatggtagagggaaaatgtgaggtccgaaagaagatagatatctcaaattcagaccttccagtcatgattgaacatgtattcttctgtgagcatttctatgattgtgccactggggctctcaagcaggttagttggctaatataacattttgatttagaactgctagttttggtatttaactgaatgtatgttctgccttgacagttgccttcaaatgtaaagctcatgtctgtggctcgcaaggcaactggtgctttgaaaaagaacaagggaaagcagatctgtgaaaataatgaagttgattcaggcaaatggatggaggtgcccaaagagagccgtattgcaactctcgacatttttgctggctgtggaggtttatccgaagggttgcagcaagctggtatgcacttccttcagtggtatggtttagcatgaaaatgttggtcttctgactgatttttttattattcattgttaaattctgcaggtgtgtcatttacaaaatgggcaattgaatatgaggaaccagctggtgaagcatttaggcaaaatcatccggaagctgctgtgtttgtggataactgcaatgtgattttaaagtaggtgaaattgtttaatttatgtgctgtgttgcatttatttatttgtgtagctcaatcaagattgctttgtgacgatgcagggcaatcatggacaagtgtggggattctgatgactgtgtctcaacttctgaagctgctgaacaagcagctaaacttgctgaagagaatattaaaaaccttcctgtccctggtgaagtagaattcataaatggcggtcctccctgtcaggtacattatattgctataagcactggtaagcagtttgttgttcaaaatgttaacccattatttacctatgtataccctttttctgttaccagggcttttctggcatgaacagattcaaccaaagcccatggagtaaagttcagtgtgagatgattttagcattcctctcttttgcggagtattttcgtcccagattctttcttttagaaaatgtcaggaattttgtttcgttcaacaaagggcagaccttccgactggcggttgcatctcttttggaaatgggataccaggtgctaattcttgccattgtctacttaaactacctagttagcacttctttgaatctgtatactgagaagttgtatacctgtttaggttcgttttggaatcttagaagcaggtacttttggtgttgctcagtccaggaaaagggcattcatttgggctgctgctcctggagagattcttcctgattggccagaaccgatgcacgtgtttgctagccctgaactgaaaataacactgcctgatggcaaatactatgcagctgccaaaagcactgctggtggggcacctttccgtgcaataactgttagagatacaattggggatttgccgaaagtggaaaatggtgcaagtaaactcgtacttgaagtaatattccaaggccattcagtttttcttttgtttctgctctggattcccatatttagtgaattcctctcttaatgcagtatggaggtgagcctacctcttggtttcagaagaagatcagaggtagcactattgcattgaacgatcacatatctaaggagatgaatgaattaaatctcataagatgcaaacatattcccaaacgacctggttgtgactggcatgacctgccagatgagaaggtaaatgagactgtcctactctgtagctgcattcactgtttctgttgatccctttttggtgtttgtgatatgttaattccccgaacatacatgtgcaggtgaagctatcttctgggcaaatggtggacctgataccttggtgcttgcctaacaccgctaaaaggcacaatcagtggaagggtctgtatgggaggttagattgggagggcaatttccccacgtctgtgactgatcctcagccgatgggcaaggttggcatgtgcttccaccctgaccaggataggattatcacggtccgcgaatgtgcgcgatctcaggtaagcttaaagctgctctgcatccatcctcatctgattacaaataacctcgaatgtgttaaagattgttgtaaggcatggtaaataatctgatttgaacctatcaacgtctgcagggctttcctgacagctaccagttttcgggcaccattcagagcaagcacaggcagattggcaatgctgtgccaccccctcttgcctttgcgcttgggaggaagctgaaggaagccgttgatgggaagcaccagcaggcctga

SEQ ID NO: 969 - DNA, 3552 bp, Triticum aestivum
  source 1..3552: mol_type = genomic DNA
ccgaacgcgagggaaagatcatttctactgatagtcataagatacttttatcaagtagtgggaagactataagtattcctttagttaaccaccgtcgctctaacaaaaatacttgtatgcaccaaaaacctcgggttccacggggtaaatccattaaaaaaggacaaattttagcagaaggagctgctacagttgggggcgaacttgctttaggaaaaaacgtattagtagcttatatgccatgggaaggttacaattttgaagacgcagtactaattagcgaacgtttggtatatgaagatatttatacctcttttcacatccggaaatatgaaattcagacggatacgacaagccagggctccgctgaaaaaatcactaaagaaataccacatctagaagaacatttactccgcaatttggacagaaatggagttgttaggttgggatcctgggtagaaactggtgatattttagtaggtaaattaacgcctcagatagcgagcgaatcatcttatatcgcggaagctggattattacgggccatatttggccttgaggtttccacttcaaaagaaacttctctgaaattacctataggtggaagagggcgcgttatcgatgtgaaatggatccaaagggacccgctcgacataatggttcgtgtatatattttacagaaacgtgaaatcaaagttggggataaagtagccggaagacatgggaataaagggatcatttccaaaattttgcctaggcaagatatgccctatttgcaagatggaacacccgttgatatggtcttcaatcccttaggagtaccctcccgaatgaatgtgggacaaatatttgaaagctcactcggattagcgggggatctgctaaagaaacattatagaatagcaccctttgatgagagatatgagcaagaggcttcaagaaaacttgtgttttcagaattatatgaagccagtaaagaaacaaaaaatccatgggtatttgaacccgagtacccgggaaaaagcagaatatttgatggaagaacaggcgacccctttgagcaacctgttctaatagggaagtcctatatcttaaaattaattcatcaagttgatgagaaaattcatgggcgttctactgggccctactcacttgttacacaacaaccggttagaggaagagccaagcaagggggacaacgagtaggagaaatggaagtttgggctttagaaggatttggtgttgctcatattttacaagagatacttacttataaatctgaccatcttatagctcgccaagaaatacttaatgctacgatctggggaaaaagaatacctaatcatgaggatcctccagaatcttttcgagtgctcgttcgagaactacgatctttggctctagaactgaatcatttccttgtatctgaaaagaacttccaggttaatagggaggaagtttgatcggaataaatataaattcttttcttatttctattttatgattgaccaatataaacatcaacaacttcaaattggactcgtttcccctcaacaaataaaggcttgggctaacaaaaacctacctaatggagaagtcgttggcgaagtcacaaggccctctacttttcattataaaaccgataaaccagaaaaagatggattgttttgcgaaagaatctttggacccataaaaagcgggatttgcgcttgtggcaattctcgagcgagcggagctgaaaacgaagacgaaagattttgccaaaaatgcggggtagaatttgtggattctcggatacgaagatatcaaatgggatacatcaaactcgcatgtcccgtgactcatgtgtggtatttgaaaggtcttcctagttatatcgcgaatcttttagataaacctcttaagaagttggagggcctagtatacggcgatttctcttttgctaggcccagcactaaaaaacccacttttttacgattacgaggtttattcgaagaggaaattgcatcctgtaaccacagcatttctccctttttttctaccccaggctttgcaacatttcgaaatcgggaaattgcgacaggagcaggtgctattagagaacaattagcagatttggatttgcgaattattatagagaattctttggtcgaatggaaggaattagaagacgaggggtatagtggagatgagtgggaagatagaaaaagacgaataagaaaagtttttttgattagacgcatgcaattggcgaaacattttattcaaacaaatgtagaaccagaatggatggttttgtgcttattaccggttcttcctcccgaattgagacctattgtttataggtctggagataaagtagtgacttcagacattaatgaactttataagagagttatccgtcggaacaacaatcttgcctatctattaaaaagaagtgaattagcgccagcagatttagtaatgtgccaggaaaaattggtacaagaagccgtggatacacttcttgatagtgggtcccgcgggcaaccgacgagggatggtcacaataaagtatacaaatcactttcagatgtaattgaaggtaaagagggaaggtttcgcgagactctgcttgggaaacgggtcgattactcggggcgttctgtcattgttgtgggtccttcgctttcattacatcaatgtggattacctctagagatagcaataaagctttttcagctatttgtaattcgcgatttaatcacgaaacgcgccacttctaatgtaaggattgctaaaaggaaaatttgggaaaaagaacccattgtatgggaaatacttcaagaagttatgcggggacatcctgtactgttaaatagagcacctaccctgcatagattaggcatacaggcctttcaacccactttagtagaggggcgtactatttctttacacccattagtgtgtaagggtttcaatgcggactttgatggagatcaaatggctgttcatctacctttatccttggaagctcaggcagaagcccgtttacttatgttttctcatatgaatctcttatctcccgctattggggatcctatttgcgtaccaacccaagacatgcttatcgggctttatgtattaacgattggaaagcgtcgaggtatttgtgcaaatagatataatagttgcagaaactatccaaatctaaaagtaaattacaataataataataattctaaatataggaaagataaagaaccccatttttctagttcttatgatgcactgggagcttatagacaaaaactaatcagtttagatagtcccttgtggctacgatggaacctggatcaacgcgtcattgggtcaagagaagttccgattgaagttcaatatgaatctttggggacttatcatgagatttatgcccactatctaataatgggaaatagaaaaaaagaaattcgttcgatatacattcgaaccactcttggtcatatttctttttatagagaaatagaggaagccatacaaggatttagtcaggcctattcatacactacctaa

SEQ ID NO: 970 - DNA, 16942 bp, Triticum urartu
  source 1..16942: mol_type = genomic DNA
tctgaaaacaatatgataaaagatagacccgggggccgtagatttcactagtggtttctctcgagaaaatagcatacggtgagtaaacaaattactgttgggcaattgatagaacttcaaataatcatgatgatatccaggaaatgatcattatataggcatcacgtccaagattagtagtccgactcttgtctgcatctctactattactccacacatcgaccgctatccagcatgcatctagtgtattaagttcatgaagaaatagagtaatgcaataagaacgatgacatgatgtagaaaaaaactattcatataggaatagaccccatctttttatccttaatgacaacgatacatgtgtgtcacttctccttctatcactgagattgagcaccgcaagatcaaacccatcacaaagcacctcttcccattacaagaaaaatcaatctagttggtcaaaccaaaccaaagttcagagaataaatatgatgctataataatcatgcatataagagatcaaagaagactcaaataatattcatagatagaactgatcataaactcgtaattcatcggatcccaacaaacacaccgcaaaaagtcattacatcaaatagatctccaagaacattgaggagagcattgtattgagaatcaaaaagagagaagaagacatctagctattgcctacgaacccataggtctgtggtaaactactcatgcatcatcggaggagcaccaatgaggatgatgaacccctccgtgatcgtgttcccctccgacaaggtgccggaatagggctctagattggatctcgtggttctggaacttgtggcagctagaattgtgtttcgttgactcccctagggtttctggaatatttggatatttatagagctgagaggcggcggaaaggacctctgtgggccccactacacatcagggcgcgccaggggcctctagcgcacccaggtgggtagtgggccccacgggcctcccctctagcacttccttggctcccaagttgtcttctaggcagaaaaaaatctctaaaatgtttcactgtgtttggactccgtttgatatgcatattctgtggagtaaaaacaagcaaaaacagcaattagcactgagcactatgtcaataggttagttccaaaaaatgatataaagttgctataaaattaatataaaaatccaagaatgataatataacagcatggaacaataaaaaattataaatacgttggagacgtatcaattctattctcacacacaagtttcttaaaatcctagacgatgcaaggaatcaacaaatttgcccttaactgctggaagaaaagcaaatccactacataattttctacaaatgattagcgttcagacatgttcattttattatgactaaacttgccaagccaaagcttttgttccctccatattgtataaaaactatgaaagctagcatggcacataacacaccaagaggcaaaaaaaatggagcaagcgtgtcggggtggagaaagaaggttcatcaatgcccattttagagttttgacttgcgacaccgatactagagccaaaaatacggagttcaagcgtcataatgttgatgatctcatgtaataaaataaatatgtttcaaactcgatttcccgcgcacaaattcattaagtattctagttgatgcaaggaatttagcaatccacccctagtatctcaaaagaaaagcaaatccaccaccatcgtacgaatagttaacgttcaaacatattcattttatgcctaaacttgccaacccaaatctttatcggcgccacgaatatagccatgtttttatactacactggtatttttagaaagatacaaagtgcaatgtgctatctttgtcagaatcaatttactacattttaaattcctctttggtttcatgtgtctaaattttgtaggaattccaacacccaatctgaccatgtttccgcaatcgttcacacttttcccatatattggcacaataaatacatttcaaattgtatcatcgctcataagtttcttaaaaaccctagatgatgcaaggaaccaacaaatctgcccttaaactgttggaagaaagcaaatccactgcataattcttctatagatgattagcgttcagacatgttcattttatgactaaaattgccaagccaaagcttttgttcgctccttattctgtataaaactatgaaagctagcatgacacataacacaccaagaggcaacgaaatggagcaagcgtatcagggatggagaaggaaggtttatcaatgcccattttagggttttgacttgtgacactgatactaaagccaaaaatacgaagttcatgcgtcacaatgttgatgttctcgtgtaataaaataaatatgtttcaaactcggtttctgcgcacaaattcattaagtgttctagatgatgcaaggaatttagcaatccacccctagtctctcaaaagaaaagcaaatccatcaccatcgtaagaatagttaacgttcaaacatattcattttatgcctaaacttgccaacccaaatctttattcacgccataatttcgcgccacgaatacaaccctgtttttatactacactggtatttttagaaagatgcaaagtgcaatgtgctatctttgttaggatcagtttactatgtttcaaattcgtgttgggttccatggttccaaattctgtcagaattccagcgcccaatccgattatatttccatactcgttcacatttttcttgtatattgcaaccggtgaatacatttcaaattctattctcgcgcacaagtttcttaaaacccctagatgatgcaaggaatttagcaatccaccctagtctctcaaaagaaaagcaaatccaccaccatcgtacaaatagttaacgttcaaacatattcattttatgcctaaacttgccaacccagagctttattcgcgccataatttcgcgccatgaatatagccatgtttttatactacattggtatttttagaaagatgcaaaatgcaatgtgctatctttgtcaggatcagtttactacgtttcaaattcgtgtttggttccatggttccaaattatgtcggaattccagcgccctgactatgttttcgtactcgttcacacttctcttgtatattgcaaccggtgaatacatttcaaattctattctcgcgcacaagtttcttaaaacccttagatgatgcaagaaatcaacaaatctgcctttaaactgttggaagaaaagcaaatccactacataattcttctacaaatgattagcgtcgagacattttcattttatgactaaacttgctaagccaaagcctttgtttgttccatattctgtaaaaactatgaaagctagcatgacacataacacaccaagagacaacaaaatggagcaaacctgtcggggatggagaaggaaggttcatcaatgcccattttagggttttgacttgcgacactgatgctaaagccaaaaatacggagttcaagcgtcacaatgttgatgctctcttgtaataaaataaatacttatcaaacttgatttcccatgcacaaattcattaagtattctatagatgatgcaaggaatttagcaatccatcccttatagtctctcaaaagaaaagcaaatccaccaccatcataaacgttcaaacctatttgttttacgcctaaacttgccaacccaaagctttattcgcgccacgaatgtagccatgtttttatactacactggtattttcagaaagatgcaaagtgcaatgtgctatactatttgtcagaatcagttcactacgtttttcaaaaaaaaaattactacgggttgtagtataatataaggtggtgtttattttatttatttatcaaattccactagttttataaaagctttatggcggctgataaatgtttcccttaaaaagggccgctacaagagtatataatacacacacccctggaccctggtccaattcatcaaatccaaatctcagaaaagaaaaagccagcacgaggccaggccgtgcgcctcctctcccagactcgctccgctccaggttcgtgttcgggtaatatcctcctgactgacctctgcagcgcccgctgtccgactcctctctctctctctctctctcagtcttctttgatcccccgtctgccatttggaccgaggaagaaggcgcagtgacgtcagggaatcaggccgcttctcccggtggactgcccagaaaaccccggctctggtggcccgcccgcccgcaaatgcccaaacccccaggtaggtggagcgcggcgcccgaaccccgagacggctagaaatattcttccttacctttccgcaggtgttcgtccgactctgaaccggttaggattcagagagagattctctttagtttaccgttctccgtgccgccctcctcctcttcgtctccgtgccgccctcccccttcgctctccctcgcacgcagattgctgcgccggcggcgtcggcaccctctgccgctcctgggattcgactaggggcgggttggttccgtccttcgcaggtgaggcgccccggctctgcctctccgtggaggatttttcgtaggctattttgttttctggcttggacttcgatcctgtatttattttcctataaaccctcttcggatcaaccgaaccgtgctgtcaaattcctgttaattcgtttcctgtgtccaaattccgtaggaattccagtgtccaatctgaccacattctcgtactcattcacgtttctcctgtaaattggtactggttgtcagttcgtgccgatggcccgtttgctccggttttgctatcaactgtccgatttgatacgagtgcctgggattgagatgcgattcctgtttccgtagcaatgcctgtagcagtttgctgttccatcaaactatttcttcctgtatcaatgatttagattagattctgttccttttcgtgtgtcatcatctacttctgtcagtacatgacattttctatgtgttcgttctgcaggatggaggagccaaatgctgaaatgggaatgccaaccggggagctgaaaggcatcacattctatctcatgaccaatacagagatggtaagcttttgctttttgcccccgaaaagaggaatatacttaaagctgatgtgcatttccaggaaaagtcaagcagcgtgagcattgtagaaccatctgatgtcagtagtgccaagttgggactaccaaatggggcaccacagtgtgagacttgcggagcgcagagtgtgcgtgaatgtgatggtgagtaatattaagcattcagcatcaaatttatgtggttgttcctaatccaaaataaattgatgtgtccaaattttaggtcattctggcgtgattaagctgccagcaactgtgttcaacccgcatctattcgaggaagttgttcagttactgaatcagatatgtcctggctgccacactccaaagcagaacagagattcaaaggtttgtaatagccagattaacctacttcatcctgatttaccaatttattctctttaatattttaagggtatcataccttatgggtcatagcgcctctggacaataaggtccttgttaaaaaactctcattgttgatctgctgaactaatgtcatggtgctaagtcctgcatacaaaataaaagtccataaaacaaatatcggtactgctgtcatagctagtgcatcttttcccatgcctaacgtatctttaaacaaacttctgcaatgtggaaactaagctttatactgattactaacattttatttgtttgaacatttggaatttgtgagacaagatatttacatttcaaaagcacatcagaagatatgtaggcattgcaatacataatatagaaactatgcatgcagaagcatatctcgtttttggtataccgggttggttcatatttattcctctaacatgttgatttttgttgtcgaagaggtcggatggggcaacaagtcaagcaacttgcaagtattgctcagtaagtgcatgttcaacgtttgggcctgtaattctgccctatcatattaaaccttgacccttttttgctgaacagaaggatggcactaaacaataccccgatgtaatctttaagacactgacaagcccaagaatgacactgtccaaggctaaacttcaacgggatcctagcgttatggacaaaatttcgcttactgcagaagttgctgacagagtgactgattcagctgaagttcttcccctggactattgggatttcgtacctcatcaccacccccctcaatcaaatatgaccaagatattactgtctccataccaagtaagtactccctccgatccatattaattgtcacagctttagtactccctccgatccatattaattgtcgcagagtatttgctattcagtaacattagtctgttctgtgttggcttgcagagcagatttggttttgctgcagcatcgtttcctgtttcttcttttgagaaaaatgttctatattattggctgacaattcatcaactttgtccctgccatatttttctcaaagcgtcaagtgtatggaattataagacaatttaaaggggattttgggttgcttgtgttgttttgaatattttataacatgcagaaaacaaaacacaacaaacactatgtgatccagaaatatgatatatcattattattatctggcaaaatagttttgcatgaacattaaggcaatacacttggtccacgatgatgcgttaccaactctctgcataaaagtggatgcagaatgtcctcatagggtgtaaattgactcatccacttttcagtgaaattataatgcacctctagttttgttcagtggacgatgtgtggatgaaaaatataattaagtgataagggaaactgggccaatgctattttctcaaagcttcttttgaaaggtggtatgcatattcttgtaggccactgcactggtattgctatgctacagcgcatttctttcaaaagtaaatggcaagcaaccgaccatataattttaaaatatttcttatggttacaaccttatttcctttatcgtatttgcaggcctctcacatattgaaacaacttgatcctgagctatttagccggtttgcttcaaggccggagctaattttcctgtcgtgtttgccggtcactcctaacttccatcgcgtggcggagttgccctatgggttttcagatggccctcgcctagcttatgtaagtgctagacctctctggtgaacttcataccaaagattattttctgtatcatcccttcaacgttttctaacaattttccccttaaatgcttttgttaaatgcaaccaaatcctctgtatggtgtaaggacttacatctgatagtgagtcaacaataaatcatgtaatcaacgagagaacctaggctagtcttcctacatctaattaaatgattcatcattactctgtctaatatactcttacacaattctgttgccaaagcaaggcagtattctctctggtttccttataggtttgttgagcatgcttgttttattgtggtctgatgcacatacttggtgcattttctgggctgtgttggtgtcgtaattatggacttatatgttttttcattccatgtttggacttaggatgacctgacaaaagcttacaagaggacggttgatgtcggtaggaaacttgatgacttgcgtcagcatccacagttcagtgttcttgcaagttcacttgtcacaagccgagttgtggagtgcctcaaattgtcaaaggcaagggagctgatatcttgttttattgcagtatcgatgttgcatgattatatgtctttctattgcaatatccgcatagcatgatccacattatccagatttgaatttccctatttttgtcagttttactaaaattatacactgtcagagcctcccttgcagttttccggtcaagttctcctgttgtattgtcagatctgtagatactcaacaaaaaaaaattaaaccaaagtctgtacttcataacctcaaccccacacacacttgtgcgcgcaacacttctctgtcgtaatccagtaaaaggacatgttagcttattttgatgcggctcttaaaaagcatcataacagtccttttaatatggttagattaggtgtattttatttgaagcagctcttgtttattttgttcccactcacacatatggagttatgcatttgacagtattatatctggttcccatttttgtccatcccttttccattaattgctttccatctccaaacatgcactcagtagttgacttgcaccatatgatattcaaattgttctggcactttacctgattgtagtggagaatagcgcatacaccaatcttccaccttgatatgttgccctctgtaaacagattaaacacaaccgacaaaacatagctgtttcatctagtcccctccaagtttaattcggttaatttcgaaggatgagtatcgggttcagtgaaagaaaagctgtttgtttttgttattattcaaaacaaagaattaccaatatgtagtttgaggtggcattgtgattattgcttatgtcatatgctttcacttgcttgataacatttttatttatttgcagttacactctaaaaagacagataaggagtcatcaacagacacacatggaatgaaatggttgaaggatgccattctcagcaaacggtccgataatgcttttcggggtactatggtcggtgatccgaagattagattgcatgaaattggcatccctgtggatttagcttcgaacttgttagtttctgagcatgtgaactcctacaactttgacagcataaattcgaagtgcaactgttaccttcttgccaatgaaaaactagtcattaagcgcagtggaaagacaattattgttcggaagccaaatcagctggtaattggtgacactgtgcacaggctgttgcaggatggtgaccttattcttatcaataggccaccgtcaatacatcaacactccgttattggactctctgcaaaattactcccagttcagtcggtactttcaatcaacccactctgttgtgcaccactcgcgggagattttgatggggactgtttgcatggatatgtcccacagtccatacagtcaagagttgagcttgaggagctagttagtttgagccaccaactattgaacgcgcaagatgggcgaagtttggtgtcattaacacatgactctctagctgcagcatatctgttaacaagctcagaggttttactaaagaaaactgaagttcagcaatttcaaatgttattatgccatccactctcgccgacaccagggccagcaataatgaaatctatacactctcatggtccactgtggaccggtaagcagttgttcagcatgctgcttccgtctgatatgagtttcagcattgagcctaaggtacacatcatagacggtgaagttcttgcctgcccatctgaatctttttggctgcagaatagcatatctggccttttttccgtcatgttcaaacaatatggcgacaaggctcttgagttactctcttctgctcaggatgtactatgtgagtttttaaccatgagaggtttaagtgtcagtctttcggatatctatctgttcccagaccatgactcgaggagaaaactagctgatggagttaatctggcattggatgatgctgaagaggcttttcgtattaaacagatattgctaagtccagattccatatcgattctgaaatgttatgacgactgtgctgatttatcacaatcttatgaacagtccaatttcattcagagcaatctgccaattataaaatcttcaatcatggcgtttaagagtgtattcagtgatcttcagaagatggttcaacagcacacagccaaaaataattcaatgatgatgatgactaatgcaggaagtaagggtagcatgttgaagtttgtgcaacaaactgcatgcgtcggtcttcaacttccagcaagcagattcccctttagaattccatcggaactctcatgtgccagctggaataggcataaatctgagggcacgggtgaatgcttgggaggccaaaacttgtatgctgtgatcaggaattcctttgctggtggtttaaatccattggagtgtcttcttcattcgatatctggcagggcaaacttcttcagtgagaatgcagatgttcccgggactttaacaagaaaactaatgtatcacctgagggatttatatgttgcttatgatgggactgttagaagttcttacgggcagcagataatgcagttcacttatgatactgctgaagacatgtgcagtgatcgcaatgtggaaggtgaacttggtgcccctgttggttcatgggctgcttgttccatttcagaagctgcatatggagctttggatcacccagtgaacagcttggaggaatctcctctcatgaatttgcaggttatgctcttttactatattgtttcacggccaatgattattgtgatgtctcttttctttcttctgatactactttaacattaatttcaggatgtattgaagtgccagaagggtggtacttctatggatcatgttggtttgcttttcctgtcaaagaatctaaaaaaatatagatatggtttggagtatgcatcgctagaagttaaggatcatctcgagccagtgaacttctctgatttggttgacaccgtcatgatcctgtcagtacatttgaatcatctttttcctatcacttcacgttgaagtactttttaattaattaatattttttgcattttgttttgcagatatgggggatgtggtatagagtcaacaaaaggaagcgcatggattactcattttcatctaagccaggtcttattctttcgaagtaaccacacttcctattttataagggtcattaagctgatgtcttaaataaatatttaaacttgtacgtacatgcaggaaatgatgacgaaaaaaagattgggactaacacttgttgtggaagagcttacagaacaatacaatgccaaaagagacaagttaaacttccctaaagtttatatttcaaaggggtaagttcagaaactatttggttcccatgaaaaaaatgttcgagttaaaattagtatttatatgtctctctgtttctttttgtctaaccactaatttggtgtgccaactgcttccatgttctcgctagcgtgaaaatgaagatacagtatatgccctgttaatatactcaactctcctttctgccctcgctctcagcgtggtaatttttcgagaaaacgcaaaggaatctttgcgtttcatttcactgaaaagatgggggagagtacatgcctcctaggaggtgataattacaggatcttagcgcccaatcagtggacttcccaggaggcgtggtaattatcactaacattcatggcaacatataagttagattctgctgatgtttaccaatcaggggataaacattttggtgtgtatgctacaaagtaattgtatttcagaagcatcagtttatagtgtgtgcttcatttctttgtcgaaatgatgtcatgaagggtaaataccgctgggaagatggtcaggcggctgtttgggagagggattagattagggattgcgaggatgaggtagcgacagataggtcgtaattcttcttgcttgatcattcatctcaaggtctcaaggggtcaagtaacaacccaagctaggcaacaaactgaacatcttttccctagttggtgtaaggcttgacttaagggatatcttctccttagttgattactaattcctagttaataatactattcccaaacttaaagataacacaattatatcccttagttggagccagctagggccgtccgtacctagcatttgggtgaccaacccacacgacagtgtcaacctagcaaccttttttctctccaaatactagattttaatctattcatcatatagtattggtcttttctggaacacctagtttgcgtcatttcgttaaggaaaacaatagctgttcatggtagcaattgaactattcaagatacaatgctgttatccattgatggattacctcacatcaatgttagaccaaaccagcaacaataaatgagttatcattcttattttggagaatttgacatcttgatatagttaaaattaccacaacaaaatactacctctgtaccaaaatataagacttttttgtagactaaactagcctacaaaaacgtcttatattttgatacggaaggagtagatattttgtattagaggagcaactatatagtacaagagacttgaaatacaaggaaggaaatctagactaatacagacacatagactaatactaatactactaaacagtttttatctaaaaatttacattgtagttaaatccaactattgcattgcctgcctaagtgatatatacacatcaatatttcaacaaacatgtcaggcattagatgtgaggtgaattgtaggctatgaagtgcttatgcatgttatgcattatgcgaatgcctactttactttttctctttgagcttctgcaatatatattttgacatgtaatacttctaccctgcagcaaatgttctgctgacaatgagtgcggtaacaggcagacttgttgcatcactgtggtaacacaggatgattcaaactctatgtctcaattggacactatcaagaaaagggtgattccaaacctcctggccttactagtgaaaggtaattatggttcgatagattttccgaaacatgttttctatatttgtgctaaggaactccttactttactagatcgagttgtagaacatataattttatttttctaagtttcatggtacaaaggtaaagttgttttcgctgcaacttgtatgattcagtcttctgatgttctcataaatttgaggacccgttatgtgacttctatgtttcaaataccacatgctaacttgattccttcagtacagaacatgcggattatatttgatgcacaatacttgttttcctttgcaggatttttggaatttaagaaagttgagatccagtgtcaagaggacagtgaacttgttgtgaaagttgttatgtctgaggagcattgcaagagtgttaagttttgggctactctacaaaagtcttgcatagcaattatggagttgattgactgggagcggagccggccagggagcgtatatgatattttctgctcatatggcatagactcagcgtggaaatactttgttgaagtatatattttcttctctttgttttgattttcacttctctaaatatttgggtcaaattgttttgaagcctgattgccaatgataatttcttctatagcatttgatgtttcctcattccttgtgcagtctttaagatcaaaaactgatgatattggaaggaatattcgccgcgaacacttgctggtcgtggcaaattgcctgtctgtaagtgggcagttccatggactaagcagtcaaggtttgaagcaacaacggactcgattatcaatctcatctccattttctgaagcttgtttttctgtgagtaatttaggcttcttctttactacaagattttcctttttaaagttcggtgaacaaattcttatttgatgtcatgttctgcagaggcctgcacatacttttataaatgctgcaaagcagtcttcagtggacaatctctgtggtactgtagatgcaatggcctggggcaaggagccttctactgggacatcgggtcctttcaagattatttattctgggaaggtgagtattgtaactactgtcaaatttaggcgcatgcttttttaggggcatttcattgtactcccaaaaatgaaaaaagtaaaagcaaattgaggccttcatatacaactgccctctactccactgctatagattcatgcatttagtttttgtgagcatagtgccagatatattttcccagatacctgtctgtgatcaggctgtgggatgcttgaactgcctgtctcgtgatgttgggattattttgtaaccagtgatttaatcttggccaagtgataaatggataaaaatacgctttctccttactgtactcgatgcatatacatatgtttaattcgatgctaacatttaactttttctgcaggcgcatgcacccataccaaatgagaacatctatgacttcctaaatagccctgaagttcggcaagcgccgggcgaagctttcttgaatggtagcaccatatctgtggagcaagattttcttgttgctgcagttggtatatgggacagcattattgatatgcgcacttgcttgcagaacatgctacgagagtaatgcccccatcactatccatggaattgtattgtgcatagtagttttatcccatttgaagttttatcttgattaccctcctatatgataccatgttttacttgcatgaaggtaccaattaaatgaatgtgttggggagctagataaatcacgtgtaatcgaggccctgagatttcatcccagagggcgtgaaaagattggtgctggaatagaagatataaaggtaatataaatgtgtttctgttttcctcatagcttcgtcattctacaattctactgttatgaatgtagctaactatagatgaatgtattaataggaattctattgtttcccaaaataataggattgattttcttacatctttgtctgcatctgtttttcatttggtatatgtgctaatattctcggtgctaacatgcgaatgtgctaatgagctgtccacttaatgtgaaaaaggattgtgttcatttaattccatctcaaggttgctacccttaccagctttcgtagcattgttgtgttcccaaggttgcatgaacaacaatcttttccctctgttcatattgttcaatctgacggtatctattgtgttacatccctgttttggtacctatgcttgttgtaaatatcgtagccaactattttgcagtgcattatggttactcttgaattctagcatattgttaccctgagatgatgtggtgtgtgctcctcgcagattggacatcatcctagtcacccaggaacaaggtgcttcattatggtacgggatgacggcacaactgaagacttttcttacaagaaatgtgtccagggtgccgcggattctatctcgcctgagctcggacgttatgtagagaggatactacggaacagagcagtttcgtcataatgttagcactgttgccgtttcatctagttcagttcagaccataggtagagagcatctgatgttttgtcgacaaggagctgttgaacagtaggtagagagcatctgatgttttgtcgacaaggagctgtcgaacagaagtggacgatggtcagttatcctagagaagagtgaactgctgattggcgaagatgccgtgcttcttcgccacccttctggtaggaaatgaacatgttgtcttgtagggcgatgccattcttttgttgtacaacccttcttctctttggcattagcatctggatatgttggaaggaaactccgtcgtgaaccctgtttgtatgtagaaattttggcccaaatttctgggtgctcattttatccacctttcagaaattttgctgccatggttccggcacttgttaagaggtgacggtgaggtttcttggtgcagctaaatcttggctcccgtggtttttacggtgaggtttttctccatgacgtttgttacaaggagagatgagtgatgattaatgctgggcaaaggggagaaggccagcgcggcgcaagggcaaggacaacttctagggaggcgacgagaatgagctagtacgatcggcaatgctgcctgcccttgggagcaaagggggaggcggggttccatgaggagcgcgcaaggggagccacttgtgaaggccacagcaggggaaggaggaatgaagggcagctaactaattagagatgcaaaactcgttttccggaacacaattaaaatgctaaaataataaaggccattcatcgagaagttctcaagttgaacttcctgtccctctctgaggtgacacgggggaccctagcttccctccctccggccccttctcccttgttgccgtggaggaacattgtcaggagaggcccgagcaatgccgatggcaacgggccatctcctggatgcggctctcccccggcggcggcggatttctttgcggcgaagcacgatgaagccgatggcggccctgctcggtggcggtggggcaggctccatctagtggtgctgccgcggccgccaggggctctaggtcacacgttctagatctaggtgggcttgtggggttggtctgtggttaccggtaggcatgatgatgccgagtcgcagtggctcctgggcaccgcggtggtgctagcagcaacaatgttagcccggcgtggtggtgccagccgttctggcggtggtgttggtcgagtgtgatgacacggcttcaaggacgaggtgatgtactggcaacggagtgaaccaacatgggcagggatgcaagggcgggtccatgcggatgaaagtcttgcccatctacgttggtgccaacagcgatgacgcccgtgggtgtcgttcccccttcttggaggcttcattgtggtgtgtcggcatctcgctctctctcacttggtttgttttctccaggtgaaagcttatgttcggatccagaatgacgatggcggcaccctcgacgccatccctctgtttggagcatcgtatttggagacatggcttggaggttctaagttgcgttcctatggtgcgcgctgctgttatggaccgttctca

SEQ ID NO: 971 - DNA, 3706 bp, Triticum urartu
  source 1..3706: mol_type = genomic DNA
tagcacaagaggaggcaggcatgcatggccggctagctcgctttgacccgctgcatgtttatggaaaatcaagccaactcggtggccgcgtagcgtagggtcgtccgtctcttgatgccatgtgctacttcctactgtcatggagtgcctgtggtacgctaggagtaggcgactggtcgtaccatcatcagtgcgcaatgcgcatgtaatgatttgcaaacttgctatcttgatcgccggccactgccaattctgacgatcgatcgcgcgctagctcacgcgtctcgtccacaagtagccgggtagtaggatggtggccggtgtttgtccctactacacaaaggggcatgtcctccctactcacgccgcgcgcgatctcgccgacgccgacgtcccgcagcgctgccaatacaaacggcgcgtgcgacggcgcatcatcaattggaccagggacgccgtgttccggctgcgcgtccgcgcctccgcgactcttccttgggcgatccaacggacgcaaagcgcccgtgggcatgcagaggcgggggggggagtcctgctgggtcggcgcaagcgagagttcgtacatcgtaatcgattcttaaacgtctccaatggaagcatatacctgaagcaaagcggtcgtgtcagctccgacgaacgtgcacgttgagcaacggtgtcattccagaggcatcattacgatccatacaaccaggtcatctccagacatggatgttcacaccccggaaaacctgagcaggaaggtgcggattcaccgtcagaagtcggtgcggtgcgtctgattcgtggccgagtcagcaggcagataacgatccccgttcgtggcgtactactactggcgtagcgctggccggcgaacctccgatgctaaattgtcaccgctcaattactgctttccgcatcaacaaacggaacggataacaccgacaggcgttaatcagttccgacttcctcctggggcgtgcgggtgcggacacgcgtcgcgaacggacggcgatccacgagcgagctcacaccgaaacggagcgacgttcacagctgcgcattaatggcggcatcgactctttccaggaaatcgggtactggctggatagaggtgcatatccacagccgcagttactcgtggtatcgccgagcgaaatctaaaaaaagggaaagaaaagctaacgcgacgctgggcggaggttttgcagtccaaccctcggattcgcccgcctctccgatggagccccgccttctccagcctataaattggtgcccgctccgcctccatttcatcctccctctctctcatcgtcctcctccgcgttctctcgtctccatctgcctctctttctgccaccacagagaactcttcttggagagcctgtgaatctcgagaggcattgagtccgtcttgagttgttgttagtgtcgccttggtctttcgtttttggctttcgtgccgatcaactccggtgctgttcggcggcagtcgcgatggccggcggcgcggttgtgaacaccggcggggggaaggactaccccggcaagctcaccatgttcgtgctcttcgcctgcatcgtcgccgccaccggcggcctcatcttcggatacgacataggcatctccggtacgtccggccccttttaatctactcccgtccatggcaaccgctctattttgtaatcttcatcatgattacagagaagtgacgctcgacatgctcaattttgttcgcacccatcgtttcaaactagaaagtttgtttgcatccggcatggttgttccaccgtccacctacccacatgcataattttcggcctcgtttatacacatggaaacaaatctctgatattccatttcatttctttatcccactactcgccgggttcttgaagccgccatgaatcttttcatgtatttctcacctggcattctttccaataaacaaactctaatactcctagtatttctttctctagagaagatgtgcatgcagaaactttaaagcgaaatcaccaacaaaggaaactaattaactctttgcaatggcgttcgtccaccaggtggcgtgacctcgatgaaccccttcctgatgaagttcttcccgggcgtgtaccaccaggagcaggaggcggagcggaaccagagcaaccagtactgcaagttcgacagccagctgctcaccatgttcacctcctcgctctacctcgccgcgctcgtcgcctccttcttcgccgccaccgtcacccgcgtcgccggccgcaagtggtccatgttcgccggcggggtcaccttcctcgtcggcgccgcgctcaacggcgccgccaagaacgtcctcatgctcatcctcggccgcgtcctgctcggcatcggggtcggcttcgccaaccaggtatacttctgtcgccactgtttctttgactttgtttgtgacgtttctttgactctccatttttcttttgtttttattgactctcctctatagctggaggaaaactgaaaaaaaattcagaccttgctttggagtgacttcttttttacagtttggctgatgatgttttttactgcttgcattggacagtcggtgccggtgtacctgtcggagatggcgccggcgaggctgcgggggatgctcaacatcgggttccagctgatggtcaccatcggcatcctgtgcgcgaacctgatcaactacgggacggccaagatcaagggcgggtggggctggcgcgtgagcctcgcgctggccgcggtgcccgccggaatcatcgccatcggcgcgctcttcctccccgacacccccaactccctcatcgaccgcggctacacggaggacgccaagaagatgctccggcgcgtgcgcggcacggacgacgtggaggaggagtacagcgacctggtggccgccagcgaggagtccaagctggtgagccacccgtggcgcaacatcctccagcgccgctaccggccgcagctcaccttcgcgatcgccatccccttcttccagcagctcacgggcatcaacgtgatcatgttctacgcgcccgtgctgttcaagacgctggggttcgcggacgacgcgtccctcatgtccgccgtcatcaccggcctcgtcaacgtcttcgccaccttcgtgtccatcgtgaccgtggaccggctgggccggcgcaagctgttcctgcagggcggcacccagatgctggcctgccagatcgtggtgggcagcctgatcggcgccaagttcgggttcaccggcgtggccgacatccccaaggggtacgcggcgttcgtggtgctcttcatctgcgcgtacgtggccgggttcgcgtggtcctggggcccgctggggtggctcgtccccagcgagatcttcccgctggagatcaggtcggcggggcagagcatcacggtgtcgatgaacatgctgtgcaccttcatcatcgcgcaggcgttcctccccatgctctgccgcttcaagttcatgctcttcttcttcttcggcgcgtgggtggtggtcatgaccctcttcgtcgccttcttcctgccggagaccaagaacgtgcccatcgaggagatggtgctcgtgtggaaggcgcactggtactggggccgcttcatccgcgacgaggacgtgcacgtcggcggcgccgacgtcgagatgcgctccaacggcaagctccaggctgccaagctcccgtga

SEQ ID NO: 972 - DNA, 10821 bp, Triticum urartu
  source 1..10821: mol_type = genomic DNA
gccgggtggaaggagcgcggcgaagctcgggccccctccttcttcaccgagctgcggcggcgccccgaggaggagccggcctcacggtcgtgcttccccttgcggttccagaagcccatggcgaggtggccggccggcgagctcgaggacaatggagggctagggttcggggctgtcgggtttcgaggaggccgcgggatggcgtggggcagtgtggacgacgatcgttccacgcttcccacttaaagaaggacggcaaccttccgatgtgcggatgacaggtggggccgcccgctcgtgcgcattgatgtgggcgggtgggaggtaggtggccgcctgtcacgcggccccgacgcggacgaggcgcgcgtccgtttggtgtccgccgcgacccaaacccggcgcaagtttgcgctcgaaatgagtcgacccggacacaaaacaaacaagatgggtccgggccgtcgcgcgctggccgccttgtttgtcccttttaccccaaacggatggggcccgacaggatggggtcgcgcgatggagatggccttatgccacgtcagcccgatacagttggttgaccgccttgtttgtcccttttaccccaaacggacagggcccgacaggatggagtcacgcgatggagatggccttatgccacgtcagcccgatacaattgggggcccctgccgttaacctaccgcccatgggctcgtcggtagaaagagggttagattccgaaataattttgaataagggtcaaatccggctaaacttcagcaaaaaggtcaaaacgccaaaattggccgcgagctgatggctggcgatgcccttgtcttgctttgcggcctgtgctcgcgtcgtttgcgttgcatgcatgcaggcgggtcgatgggctgcccaggctttgttaggagcagcttttgtctgcttgttcaggcatgccaatgccgtgccatggcaggtcaggtcaggtcggtctgagccgctacgtccccgctcagatcatgggccgttgtacgtaacgtacatgttggaaagatacagggccaatgctgtagagtgcgaaacggacatccaagacacgtccttgatcggaatgaatcaagtcagaaaacatcggtaaacagtaaatatgaagagccaaagaaaaaaaaaatccagcacggtgcaaatgcaggagcgctggcaacgttgggggcgcgccccgtctaggagtccatcaacgcgtgctcatgcccggtcgttgtgcagcgcgcgcgcaggagccattgggcagtcctgccgctgcagttggaatccccgtggacccttaaccggccgggtagggggagcagagcactgtaagtttggaaacctgcgaagtttatcctgatggacccatccatccaatgcatgcaccttgccggtcatccatgtccgtgcgatgccaagttgccagccaaaccaacgacaggctttcgtcatcgtcatcatcctccccgcgcgcctaccgaggaggatatcctcgcagtcgcaagcgcagagccgcaggctcccctctcccaacgtacccatggccctggcgagcgggccactcccgcgtcattagccccacccgtcagcgaccgagcgcggacagtacaggagatacaacgaccagcaggggcggattggtgatctctccgacgagacgaaacggactcctgtagcagagagcctctgtcacctgatcctgtggtccgctaaacgcgacaaagagaagcagaaaagcgaaaaagcacagcagcgtgtgtgtgtcgatcggcagatgcgcgcgcgcgccagcgccattgttcgatcgccccatgcatggagccagtagcccggtgcacgcacccacgctaaccctaggcttgactagctcaggcgtgcagtcgctggctctcgtctccaaccctgcagattccttcctcgtagcacattcacactactagtggtacacaccatttctcgcatgcacacaaaccatcttccaatttctcaccgtgttcacccacactaccactagagtctactagagtctagatctgagacgcacgcccaaccaattcgatgccccctacaggaaaggaaagctcggcgtgtgcgcgccccgtcacgagcccccgcagcggcaagttcacggtgtgcgatggctccatctcaccgaacagcacaagcaaagcagttccttccttccgccggccacacaatgaatcaatctttcccaccggacgccatgccaatgcccatgtgccatgcacattacacgcacgcacgcacgcacgcacggatcaaacaaacaaacaaaccacacgctcgtccacacagcagcgatatgatggtctccgtcaatcattgtccattctcatccgtccatccatcggtctggtccggtccacccgggtcttggcgatcgtccttgtcctcgtccacagcgtacaggagtagtagtagtagtacgaactccaccaacacacgcctatctccgcgtgccccgaggaagatacgccccaccccaacccaactcaaccaacccaaacccgtcccacgccacgcacgggccaccgccaccttctacccaacaaaacccctggctccccacaaaaccctagcaccgcacactggggccccgcctccccggccccgcccgtcagcgactgaacaggcaccagcagaaaactcccgaagctaccccgtctctctctctctctctctcctcgacgagccccgccccacagcagcggcggcagcagaggctgtcccctcggctctgacatggcagcgggggcccagcgggaaggcgacaaagcggaggaaagcgagcgcggcccctgcctagcccacccatagctctcctccggacgagcttgcccctctcccgccttccaagcagcttccggggtggggcagtggccagtggcgaagcgccacgcgtcgcggggatcatgaacgcaacggggttccgcgtttccgtttccgtgctacggcccgcccacggcgcggcccggatgccaggaacggcaaaaagcgcagagcttttaatgggaggagggggggtggggtggggcacgaaagctgtgaaggggtactacgacgggcgggtgggtaccgactaccgagacatgctgtgctagagagagagacggtgagcagagagggacaggcggacaggcctgtgcaggataagtgcggcttttgcagtctgcgttcgccgtgcgcggtgggcgtctgtgggtgccggagggcggggagaggagaggggaggagcgctccactactagcagcagtctacataagaggagggcgatcgagcggaggcgcagggtgtttgtctgtgtgagcgagcgggaagagggtggagaggggtttcggggaagcagcagagcaggtgcggcgaggctttctgcgactccggccgcgcgcatgggagaggtgagcgagcgatcgaggcctggcgtagccggcatttcttcgtcatctgcgtgtcgctgatttgtttccgcctgcgtgttcgattcgatcgatttcttcggggtatgagatgagatgattttggcctcgcggttttgggtgggcctctccgatgagctctcgcttgtgcggcggtgccacggttcgccgaccgccggagcgagagggagggagggaggtggtaagtaatggtccttcgttttcggtgccggttcggctgggttggttcgttggtttcgccgtttcggggcacgggattgggggttttctcctaccttctccgccggggttttcaaaggtttggtcccggccggtgtttccggacgatctggtcctggtttctcgcgggtctcgttgtcatgcgtctgcatgatccttcgtctgcatgatccttcatcgcgctcccccgtccatgacccaccgtttgctgtccctcaaccgagattctcttcagtttgcttcaggggatcaagtcttctgtcactccttccgaaccctttgctcctcctgcccgtgctagttttccccctggtttccgtccagtggtggtttgttttcgatccgtcctctttgcaaatgctggaagttaatttgggtaggtgttgctttggggttttttgaccctcgtcttcgatgttttttgcgtcagattatcaagcgcaaacgcgcgtgttcttcttcttcgtggtgccgtttgatgaggtcatggtatattccttccggcttggcttgtctttgctttgcttttcctttgggacgatttgatttgacgaggcatgcaggcactctctggcgccggtggagggagagaaaatgagattccacgctgccgatcataaccggaaagcttttcgtcctcggcgatcgttttggacggggagcagttccttttcccagcttcgtctcgggcgacgtgtcgctccggcccgtgatcgatcgacgccctgacatgaccagtctgcgtttctccatgattcgagcgaagcgagagcctgctagctgcgctttcctgaccgagctttggtcgagtctgcttgttcttcttgcgctccttttcccttgcgtgtcctcaaggcgatccagtttccagtttcgtgcctgcgctctgaggcctgcagactgccactccatttatgctaccttggctggctgcattgtcccatttaattttgtcatgttgttttcgatcggttttcgtcagaaattttggagcaatcttcgggtctcaaaagatttcgtggaacttttttgcggcaagtttcgtggaatttttttgcagcaagtttgacttgtcacttttgaattttgattcgatttggtttggcgcttggatggtgcagagcttgagcgaggagggtggcgggacgacggacaagatgggcaagcaggacaacgacgtctcccgcgccgtcgtggaggacgacaccgcgctcctcctcgcggcggtggacagcatcaagaaggcggcgctgggccggctgcgcaacggctccgacgccgccaggatcctcgaccaggacatgtccaacaggctcctccacctcgcctgcaggcacgacgccgccgagtgcgccaggctcctcctcgacggggagtacgggatcacgccggcctccgtcgacgccagggacccgctcacgcggacgcccctccacgtcgctgccgaggggcactccaagaggtgcatccagctgctcctctccaggaacgcccggacggacgtcaggctgctcgatggcacacgcctagtcgcgctcgaggtcgcgctcatgagcagaaggtgcgtcaatggcatggcaccaactgcgtgctactagtatttgctagtactgatgattgctcatttggtcgatgccatttgagatcaaactgacagcaatgcatctgcgtcctccctggctgctttctcttcagggttcaagttgattggtcacaggacaactcggtcgaggatcttcttgcttatctgcaacaaaaggtttgtcccatcactaaactcacacacaggtccaaacttctcttacatggttgatactagataggatcaatttctcatgccaaactgcaacttgcctggatgtgtgtgcaggatctgaacgcggtgaggcttctggcagagaagaccagggaggttggggaggtggcttacagatacgccatggaggggcgtgtcgctgcactcgcaatgctgctcctggtgactgaggaaaggatatcggcgatggtgagcgtggtgattgatggcgtcaggacaaagagatcaatctacaactctgttgtggacgaggttctgtcgattggagaggcttcagctagagaaggcaatgaaatgaggaggaaagccttgctctgtgagattcagctgcttaaccaatttggggccacagtgtggagggaccgaaaagttgacaggagaagcttgccccctctacttagggctgcaaaggtaccgattgctcttagtttcatgctacccttaaattgtcactattcccaaatttcgcaatgcactgagtattcagtgtcttttgtttgaggtctacaccggtttatttttcttttaaacgccgctagatttgcattgcacatgaaatgagttgctatgactgttatgaagtttaattgagtaatcagtgtgtgtaactgaggtctacgccttattttccgtaaagacttctagattatgcatgaagtgagtattatgattatgatctgcaccctttgtttatataatcaagaagcagctctgcattttcttatgtttggttgatggaatattgttgtaatcatgcaactgcaacttatatatggaaaaactttcaatgactgagtgttcagtgtctttactttgtggtctgcacagacttttttcccttttagacacttctggatttgcattgcacatgaaattagttgctaggactgccatgaagttaagtgagtaatcaatgtgtgtaattgaggtccaccccttattttaggaaagactcctaaagtaatacatgaaatgagttactatgattatgatcaacacactttgttttacgtattatctagaagcagctctgcattttcttatgttctggtggatgtgatattgctgtaatcgtgcaactgcaacttatatatagaaaaatttacaatgattgagtgttcagtgtctttactttgtggtctacgtagacattttcccttttaaacacttgaaattagttgctaggactgccatgaagttaagtgagtaatcaatgtgtgcaattgaggtccacatcttattttagggaagactcctaaaataatacatgaaataagttactatgattataaatctacaaactttgtttttatgtattatcgaagcagctctgcattttcttatgttcagttgatgcaatattgctgtaatcgtgcaactgcaacttatatatatagaaaaaattacaatgatcgagtgttcagtgtctttactttgtggtctacacaaactttttcccttttaaacacttctggatttgcattgcacatgaaattagttgttaggactggcatgaagtttaagtgagtaatcaatatgtgtaattgtggtccacaccttattttaggaaagactcctaatgggttactatgattatgatctacacactttgtttttatgtattatctagatgcagctctgcattttcttatgttcagttgatgcaatattgctgtaattgtgctaagcctaacaagctgcaatttataaagctgcatcttatacatatgaaaaacttgcaatgattgattccttgtgtaggccggagatatgaatgtcacaaagatgcttctgatgggggatgttgatgtcaatgaaaccgaccccgaaggaaacacagcacttcactggtgccttagtagtagctcaagcacacaggagccaaggtgcagctaaactgtaccattaaaaacacttcttgaaaattctgctccattaactgctaaacagtaagattgttgttctcgctatttccaagtgtccttaattgtcttctgtctttgtgcaggattgtgtggctcctgcagaagaatggtgccagagttttccaggggaacaaactaggtctcacaccagtgcacagcgctgcagctaagggcaattacaaggctcttcaggtagcctttgttacttccttttcaagtggttaatataataccactgtgactaattggtattttgtttctttgatctgcaagtcacttctgcttcatgcacaagattgcgttgatataccttccaagaccaaagaaaccccattattccttgcagtgaaaaatggttctttgagctgtgtacgacttcttttgcgttatggggctaaccccaaagcccagaacctacggtgagtaatatttctgaagaattcttgtattcagtgatttgatcgacttacagtgatgcgattctttggtgttgaacagaaagcaaagaccaatagacgtggcgacatcccaggacatgcggttccttctcaactccgcaaatgttgtaccaagtaagatgattttctgggatattaaatatttgactgagttcgcaaatagaacatctcttacgtaaatacaagcacttcatttgtccttttgtgtatctcatgtaaataaaagcacttcacttgcccatagttttgtgtttgattcttcaatcaaagcacatgttctgctataagatcacattcttctatgttctattgcttgatctgtttcattacactggaaggattttttttttttttgcaaataatactggagggaattttattgtttgaattacataaagattggttacatacttttggttttactgataataatgcatatcaagcactactgcattttcaactgaattttgttcctttttagtgaaccatggctcaatggaaaagaaccatgcaatgaaaaaagaaaggcacaaagagcttctggatgatgatttcgatgattgtgacaacgacgattattatgaaaggtatttcttatatctttttttttctttttttcaaaaaggggtcaggcccatatctgtacacaattacgtgaaatgtagagaaagtgctgctcatttgaagttaaaattaagatattactttgaatatccttgcagctatgttgtgccaaaggcgtcagtaggtcaccgggattttcgggttaaaagtaagggccacagtaccccgaaagaaggccccaaattatctcgggtaatctaggcatcctgtatctgtattaccaagtgacttcttttctgtttacatgatctgcttacaacatattttgtttatagcataatgatcattgggagaagcatgactacactcgcaaaatctttgttgggggtctcccgctttcagtagacgatggtatagcttcatattcctgaaccagttatgttcaacacagtgaacatgaatgtacttctaacactttctttggcatttgtttctggcagcgtaccttagcaaattcttcagtactgaattcggacctgtggaggaagcaatagtcattaccttaaaaatagacgagaggatacagtcccgaggctttggctttgtaaaattcaaaagagagaaggatatgattagtgcaaaggaagctcatcatgtctatgtgcttgggaagagagtggagataaaggatgctgttgctagaccgtccctgcctgaactcgaaagagcaacttccttcaggcaccatgtacgtgagtccccaagagtgactcatagtgagctggaggatgaacaagctgagcaatataactttggaaaacggcggccaatgccagagaagcacctcccgtcttggttcttcatattcaggaggtggttgccaggatttctcatggaagcaaccgagcgatatggggagaagtacccattatgctctgtgaagactgatttcagatcatgttgcagaatggagcttgatcattctgcccttggctatcctaagctaagcgatttcatgcgctccctccctggcatatgcaggatgcgtgtagtccctgtaggaaatggccctgcaacacatatggtccttctgccacccctctcaaggccaaagtatgtacccttgctggagccttactcgtttgatcatgacgagctcccagaatcagtgtcagatcatcactctccaagatcaccacttaccgccaatatcactgagaatgctccttatagcactgacagtccacagggtgatgcatgcagcgagaccaatgtccagagccagcatgatgatgagtgtagcagaagcaatggcgaaagcctgccggatggtgattccacctccaattgtagcttacttgatgaggttactgtgagcacaccaaagtctgatttgatcgagtcacctgcaagaaagcctgatttgatcgtgtctggagctcttcctggaaaagccgaacaaggaccgttaaggaggcctgatttggtcgagtctgcacctacaaagaaactcgatttgattgagtccagtcctcctccttctcctcctagcaaggctgatttggttcagcctgggcctgcagggaagcttcatttggttgagtccagtcctcctaggaaggctgaattggttgagccgggaccagcaaggaagattgatttgaatcaacccagaccaacaacacgctttgttgatcgtcctgttgaaaggccagcaatcactccaagcagctgcgagaatgaaatgagattctccttcttccactcacagtgggacaagtacctagtaagtgctcccttcttctcttgtgttacgttgcttgccacattagttaggctcagaatcatgtcttgattcattgactgacacacttatttcacctgtagactccacatgccaagagtgactactgcatcatatgccgctcctgtgaggccgcgatggagcttgtcccgtgcctccataagatatgtgttgcctgcatgatgaggtgcaatgtcagggcatgcatgacctgtggcactgctgtaagtggagtcaagtctgccccggcgctggacgcaaaatcccgacacgtggtaacaaattttctcagcagctaaaatttgctctgctgttctactttcactacagctgcattcaattttgcctgatgattaattgctgaacacgcagggagtcatggagtgcgtctcggatcaaaagtgccagttgatggttgtctgcagtggagctgatgcagttgtgagatgctccccctgcatgcacaccatagcttgccgaggctgcctcctggcctcggtgacactgctcaagaagtgcactgtctgtgactgcatgattgagcacttcaagtttggtccataa

SEQ ID NO: 973 - DNA, 10006 bp, Triticum urartu
  source 1..10006: mol_type = genomic DNA
caggagacgaaggggacacgatgtttacacaggttcgagccctcttaatggaggtaaaaccctacttcctgcttgattgactttgatgagtataggggttacaagagttgatctacctcgagatcgtaatggctaaaccctagctgtctagcctatatgaattttgattgtctctacgaactaaaccctctggttcatatagacaccggaggggcctaggttgtacagagtcggtttatagaagaaggaatctatacatccggacgccaatcttgccatccacgcaaaggagtctcatccggacacgggggaaggccttctactttgtatcttcatgacccatcagtccggcccacaacacacgagccgaacacccgaggaccccttaatccaggactccctcagtcaccgagctgaataccttggcgatgccgagatgctcatttggtccttcttgaccgcacccaacgccttctatatcgacatggttgtagttctcacgaggcatgcatcagtcaagaaacaataagatgattgatgaattcccgaggcgaagaggacgacacagttttaggagcaacagtggcccaatggagggggagggggttgaagaggatttgattaggtagctatctgattactagatgattacggaaatactatttgagtaggtaaaaatttgattagcgatatttccataaatacacgcggtaagctaaggaaaagcgggatcgaggggatcgaaactcctatcgatcgatgcggggaggaaacgaacgaacgaaacgagcgaatgacctacgtaccgagactttaggtatagagatgacggagaaccagggcccgcagtaccgctaagggagacgcggagaacgagagctcgccgcccgcccagaagaaaattttgaactatgattgaatctatgtcgtacaggagaaagttttgtacatggaaagtctcgattattgtttttctgttgtatggttgattggtgctgtatatggaaagtcttaattgtttggtcaggagaaagttttgtatggaaaatatatgaaaagtcttggtcaatgatgtatctagaaagtcttgattgtacgattgattatttcttttatatggaaagtatcgattgattgtctgattggttcgcgctgaaaaaatggatggggcaggctggcctttgatggggtatgaagcgacaagacaacctaccaactactccctccattcaaaattacttgtcaccggaatggataaaagtggatgtatttaaaactaaaatatgtctaaatacatttatttctttgataaatatttctggacgaaaagaatactcattaaaaataaagattaagagtagtagagatttagactcctaaaaaagagtaatatatattctgagaccaagggagacactcagacacataaacctgctcggagtacagaaacccccaagagcccgccggaacaccaaacccttctgtccccactacattccgatggcgacggcggtgtcagcgcccgtcttcacggcgacggtgcgggtttccaatatcccgccctccgccgtcgctaaggagctcctagcattcttcgattccgccgtcgccgctgccggcgaagcctacgcctgcgagatcgccgccgcccgacgcggctggtgaagtcgaggcgatgggagcggtcagttcgattccaccgccaccgcaaccctcgccgctgaactcgcctcctcctgtcggctaccccgcttcctcggctccctcctctccgtctcccctgcctccgtggaccttctcccccgcgcgcccgacctttctctccgcgtggccgacgcccgcctccttgtcggcaaccgcgtcgccgagcgcgaattcgaggcggccgacacttgggacagcgtccgcgtggaggtcatcccggggaagcggcgcatagacctgtacctcaatcacgattcccagaggtacaggcttgaggtgtacttcgaggacatcaggaactgtctccagtgcagcttcgatggggccggcgtcatcttgcttcaggtgagctgttcacggtgtttatttatttttgaacgttgcagactgtaggagaggctcctacagtcatatatattaatcaaaaaagtactttacatagtgtacaagggtgtggtggggcttttgccccaatcacagtgtactagggttcagaggtataagtaattacaggggattaaagtagtttggctaaccctaggcaatctctctggcaaattcagtaatgaaccctagcagctcaggttttgtcctgtgttgcaacatcaagaaatcttctctgaatcttgacaaccaggacctgtcggaaggcgtcactcctctgaagatcaggttattcctctccgtccagatcgaccacgctgctgtggtgaacacttccatgatcacgggtttgtttagcctctgccatccagtcaaacctatctccttctgttgcccaggtcaacccaactgaagtccagcacgtgtaggagaaactgcaggtatagagcagatgttccagagtttcttcttgttgggtttggcagagcacacagtagtccgtcctgtctgtcgatgagcccattacttaatgtctacgtttgagcatgttcttggtgttttaatctgtcggacaagaggagccacacaaaaacccttagcttcattgtacacctcgacttccaaatccaccgaaaagcctgattagccatgacattttcaaaggagaacttgtaatatctggacgatgaatatttgggccccccatgtgtatgcccaaacatctctcagctctaggtctatctgacactcagcggtctccatgggcagccccaggtacgtgaacggcatcgagcctactgtacatccaaagatcgcagcaaagcctgccgccgacgccatgtctaggttgatcggcaccagagtagtcttctcgaagtttatccaaagtccaaccgagtcagcgtaatcaagcagaattttcttcacgcctcttgctgttcttcatatgcctgcatcacaattatcgtgtcgtccgcgtattgtattgcgggaagtctttgtgtgtgcgtggggggattgggtgtctgaggacccctcggcgaagtgcatcgttgacagcagcttgcagcaggtcggccgtgaggacgaagatcaagggcgatagcgggtcaccttgtcgccccgcccccggcggcggcatcgaaactgatggcccggaaccccattgagcagtgggaaaagtccatgtgtctcatgacctcaatcatagccgggtgttctatagtatcgaaggcctgggaaaagtccagtttcagaataaacgcgatccagaggcttgacattggtatatatactcgaatgcccaagccaagcaggtcctgtatcgttctccctttcaaaaatccgtattggttcctgtgaatgatttttagaatccatttctgtaaccgatccgcaagcagtttgtttattagcttcagacaacagtttagcagtgtgatggggcgaaaatcttttgctctctggggcgagtggatcttcagaatgagaatgatgaacccggtgtttatgctttcaagattgagttcttctgtgtggaaatcatgacaaagctgataaaagtctggtttgattatatgctagcatgatttggtaaagtaaccactaaatccatccggccctgaagctctgtcggccggcatggttccaaccacctcatcaatttccgcctcagtgaatgggacataaagttcttccagtccatcaatcttggtaatgatagagcctgtgtcgaatttctgatttggaggcgaagattcccccaatctttctttaaacacattgagcagtatcccttcgttgcctgtgtggttctcaacttcagtgccatcgggtaatttcagcatggcgatgaagttatttcggtatcgctctgtggccatccggtggaaattttcgtagtttcctctccaaaacgaataaccctgacagtgcatctttttctccagtgttggttctgaatgttcagaggctgcagcaggtgagtttttagaattcgcccgaagttcgattctggggttgtgagtgttctcaggttttcaatttcatccagctcgttaacggcccattcagtgttttggatcagcactttgagacgtgagaggcctttactccactttttaagggtgtaccttagtcttctcattttctggcaaatcctggctgcactattatgcaaataacttggtttggaccaagaagtattcaccacatcaaagaagcctctgtgctgcacccagtaagattctaacctgaaaattttgctcgcggggatcgatgatcctatactgaccaaacaaggcatgtggtccgggattggtttggccatggcagtaaccttggtattaggatatactgaactccaattgttagacgtgaagaaccagtcgagttggtcaccatgttgctgtgatacttctgtttttcctttgtacattatatattagtcagacgttgcggtcatagggcgaagtagaaatttgaagaaggaagctctagatgtacttccctccctcaatacttgcgcgagctgaaaaattggcaagttctcgattcagtaaactagagtgaaccatgtaagatggatagtggtgcgacttttatttccgctcctataaatatctcagttggtggttactaattggagtgaaatgaatatgaagcttatctgatgaatacacatcaccgttacttttctaaatttactgattgccatacttcttagactataagtttgtgaggcgcaacactcttttaattctttctataattctgaagttggtaaaatatatattatcttgactaatgttaatttactatttgtttcagctcatgtatgcaccaaggatatgcacaacaatttctgggcctgcagtttattcaaggttctcagatgaccgctttcatgcatgcaaggaggatgcaaaatttacctgggtcagagcactagattttacacgcaaccactcttttgggaagtgttcaactcttgccctcgtacttgatgaaggtgcaccggtgtcatttattctcaacagcttgcctatgtcaggagaattaggggaattggtcatttcttcaatggaattttttggcccgtcgtccaaagtcgttccccttgttgactgcccaagtggttgttcagtgtcatatgaagttctttttcgtctcaattctcttgttcacatggggaagatagtttccaaggatgttaatgccgatctgtttaaagctcttgaagaaataccagttcatatttcaaggaggatttttgagaaaatgaacaagttagactttacatgctatgaacctttgcaattcatccagcaggaggctcatagcaggaagaggagccatgatggtttgctttccagtaagactgaaggtgaaggaaagttaatgatgtgttacagaattcacatcactccatccaaaatatactgcttgggacctgaggaagaggtttcaaattatgtggttaagcatcacaaacagtatgcttctgactttgctagagttacttttgtagacgaagactggagtaagctttttccagatgctatctcagctagaactggacgagggttcttttctcaccccttgaaaactggcctatatcatcgtattttatccatcttgaaagaaggattttccattggtccaaagaagtatgaattcctggccttctcagcaagtcaacttcgtggaagttctgtttggatgtttgcctctaatgattccctgaaggccgaggatataagcaggtggatgggcaactttgaagatattcgttcagtatctaagtgtgcggctagaatgggccaactgttcagctcctccagacaaacacttgaaatcctaccacgggacgtagaagagattccagatatcgaagtcataactgatggcagtaaatatatattttctgatggtatcgggaagatctctgagagacttgctaaagaaatggcttgccgaattggattagactataccaaccctccttcagcttttcaaataaggtatggtggctacaaaggagttgttgctgtggaccctgattcctttcgtaatctttctctgcgacctagtatgaagaaattcgaatcaaagagcagaatgtttaacattacaagtaccagcaaatcccaaccatgctatatgaatcgtgaagttatctctctcctttcaactttggggataagagatgagatatttgagtcgatgcaacagaatgatatgcgtgaattagatgaaatgctgaccaacagagaagctgctctctctgttctggggaaaattggtagtgcagaaacaaagacagcatcgaaaattttactgcaaggctatgaaccaagtttagagccttacctgttgatgattcttaaggcccatcaggataataggctgactgacataagaactagatgtaagattcatgttccaaaaggccgtgttcttattggttgtttggatgaaacaggtgaattagaatacggtcaagtgtacatcagaattacaaagaacagcaaagagcagaaggataattgtcagccatattttgctgaagataatggaaaagagaaaacagcagttgttgttggaaaagttgcagtatcaaaaaatccttgtctccatcctggtgacatcagagtacttgaagctgtctatgaccatggtttgtacgctaagaacctggttgattgtgttgtcttcccccaaagaggagaaaggtaatgtcgtatgttatactgaaactgaaagacgatcatctagagtttatattgctctggcaatgccttcagaggagctcaaatctctattgaagtgtttgtcagcgtgttcgtttccatgttagattgatatcccctcatgttacgtacttacatctctacctattgatggacgttgccaatgcttgctttctccttcaattaatctttgatgtttaataggccttgtttatgtagaatttaatctttgatgttaatcaggcctcatccaaatgaatgctccgggggcgatttggacggtgacctctattttatcacttgggatgagaaactgattccagagaaggttgattcacctatggactacactgcagcaaggccacgcataatggatcatgttgttacacttgaggtatattcctcgctgtttattcattttaatttctcttactaggttgttgctgctaatttaccgaagattgttttatttgactaatatcaatttttatacttgcaattgcaaatataatgaaaatctcagttttttacaatctgtagcatttcgataatactagaagaaaatgtgcacttcgccgcaccgttttccattgttataaatcatcaaagaaggaattctttaaacaaaacttctgatgcaaacaaatcacaggctaaaatcattcattttgaacaactttttattgcttgcctatgggttcatgggttcccagagaatctggcaagatatattagctaggttttgaagttgacaaaacgggaaggaaaaactgcagtgtaggatctactctctctgtaaagaaatataagagcgtttagatcactaaagtagtgatctaaacactcttatatttcttcacatcttttattttctctctttctttccatgtttgtctctttcttgtccctgtggtctagttttttgactgctctataactcttttaggtccgacgaaaagttattttcttaaaccacaacatgaccacatgacaaatccaggatgttatcaataagcaataatgccagactgagctgtgcactttccaaatttggtgaaaagtgcattctatcttccaattctttgtagcctgacaaacattctaagtggtcactgctgaaaattttgtgataatattagcctattttgagcttgcgtaactgaacacatcaagaacctgacggcgtgattgtacacaaaatggcacacaagcattctatactgcacccatgtcaggtttaattaagtttacagctcgtttactaatttaattagagtggacaaataaggcaagtaacctgaaaattccaacactaagtctgtccgaccactcctttcctgcctttctgttttctctatccctgtgtgctaagtgcctcaggccgatttcgccgcaccatgtgagcccgagctagagtccatcttccactgattacccccaataaatcgaacgaccaaaggcccatcggccgctacatgaagacgtgccaacaacccttgatggattgaatggaactatatgtaactccattaagagctatagcaaaccatcagattaaggatgggaacttcaccttcagggatgaacacctgatgtcaatgcgaatgaggtaaccacagtactaagtggttcctttggttgtcgatgtggtggctggttggagcagcacctcccctcaaagcccccgcccccctccaaagcagcaatccagggcaccttagtcaaaggcagtttagattgtgtcaacgccagctgaccagtgggaccaaaatgataaaaagccagatcgctgagggcggtatatttcgggggagcttagtaactttagagatttattatcttgaggcaccttacatctttctaaaacatttctttcgcaaaaactgggtgcatgcctacagccagagtgaactggctacgagcgtcgaactcagccaggatggaataacagcacaaaattttgaatgctttggaccaaatatatgctcgccatgcacagttttttcttttttgattttttcgccatgcacagttaataacgttctttagaaatgtgggtacttatttcggaaagaaagacatttttgccatcctctaatgaaaacagttgtgcatgattgagttttaaagtggtgttggctttaaaatgctcttcaatgtatatatctaaccttgatagcttcacaactactccctctgttcctaaatacatgacgatttggccattcaaatgaactgccaaaacgtcatatatttaggaacagagggagtatttaccagttagctccaataagcagttcaaagttgtcttttcaacaagcacatgtattttccttgcctgacatgtttatacctgtaatcttataagaacacctgatgaactgcaggaaattcagaagtactttgtggattacatgataaatgactcgctcggtgcaatctcaactgctcacttggtccacgcggatcgtcatccaatgaaagcccggagccctgagtgcctccagctagctgctttgcattcgatggcggtcgactttgccaagacaggagctccagctgaaatgccccggtcactgagagcaaaggagtaccccgacttcatggaacggtgggacaaaccaacgtacatctccaacggcgctctcggcaagctctaccgagcggctgcgagccgtatgcagagcgctcctgccccctcgtcctcggctcaatctagccccgcgttcgatcctgacctagaggtccctggcttggaggaattcctggcatccgcggaggagttctacgacctgtacgcggagaagctgagcaccctgatgagctactatggtgcggagcatgaggacgagatcctgacgggcaacatccggaataggctcctgtacctgaagaaggacaacaagaggtacttcgagatgaaggaccgcatcatcgactcggtggagggcctgcacaaggaggtgcagggttggttcaggagccgcccaaaggcagaggcgtcaaggtgggcgtcggcgtggtaccgcgtgacttatcacccggagcaccgacggccgggaaagaagcagttctggagcttcccgtggattgtctgcgacgagctgctgaagatcaaggagtccagtatgcggcgcaggcagcaggtggacgacgcggcggcctga

SEQ ID NO: 974 - DNA, 1564 bp, Triticum aestivum
  source 1..1564: mol_type = genomic DNA
aatacaaattaaaagaaaacaggtatataatctgttgactaggtgtagttggtgatcagttgaatgttcacgaatgtattccattgcatttctaattgcaacaacaacaacaacaacagcaacaacaacaacgaagcttttagtcgcaaacaagttggggtaggcacataagatcccgcaaccaactcatagttctggcacatggatttctgaaatgcatatatttaaaataattattcaagatttccacgatgatgttttattgcattctgatttcactcttcattgatgctcactagtggttaggcatgggcaaccaagaacttcttgagtatttcagtgattatgctgcgaccaaagcacgccatgcatatggtccaggtgggcaccgtggcatgagtgtgctaatatttgaaagctctgctgtgggctatatggaggcagaacgtcttcataagcattttattgatcaaagaacagacagggacacttggcagaatcgcagggttcctttcttacctggtgggaagagacaattatacggtttcctagccagaaaggaagacatggagactttcaatagacactgccaagggaaaagccgcctgaaatacgagatgagatctcataatgagatggtagtggcccagatgaagcaaatgagcgaagataatcaacaactcaattatctgaagaacaaggtggttaagacagagcagcgctctaaagttgtagaagaaaccctgggtgttattacgcagaaacttcgagagactatggaagagaatatattcgtcaggagtaaagctaaagagaagcactctgagtatgaggaagagatgaaatcccaggaaaaattcttccatgatcagatagagaacattcacaaggccacagaagacaaggaaagcgagtttgagagattgctgcaggaggagcgtgcaaaggctagacagtgtgatgtggattctgggactactgaaaatcgcaggctaaggaaggaacaggtacagcggttcatagagtgccaggttaaggacgtgcaggagtttgaggctgaaagggacgaaatgataaaagcgcacgaggagaagaaggtgcagctgaagaaagagtacatggcaaaggaggtggagctcgagaaggagtttgatgctgctctcaccggtttgatggagaaacataggccaggcaccttccaggcctccagctccagcccgtgaagattcacaactatctgagatttgccttctgcataacgacatctaaagatgcaagaccatatgtggtgcatgattaggaatcctgaacttgattgaacctgtatgggtggttatatggccatgattaggaaacctgaacttgtctgagtgtcaagtgtcagtagcatgttttacaccactatctaatgactgcctggggagcaagcgtcgaatcccttcttgaacatgttaactgtaatgtcatcttgttgtgctttatgtcgaacttcggtctggcgggcggcattgattgagtgaaaatatagacaagtaatttgggatggaaaaaaaaaaaaaaaaaa

SEQ ID NO: 975 - DNA, 6167 bp, Triticum urartu
  source 1..6167: mol_type = genomic DNA
ggtgtcgagcaagtcggtggccccaccgggtcgtccgggtttcggtacggaggggcggaagatgatcgtgcgagcgaaccacttcctcgtcggcttcgcggacaaggacatctgccactacgatgtgagcaaccctacctctcttcgtccagaagttcttcctctaccatagattgcatgctggctagtggttctgttacatttgttttgatgcgatctggccctggttgcgattgcgacttccatacgtgattatgcgcgagccctggatttttagtctcgcgtcttttcggttaatttggaaagatctcgtatcgatcttttgcttgatggttgtttccatagataagtttcattgctgataaacacgatgtcaggggctaggatatgatgactacgtggtcaaatttattttgcatcgaagacgcgcagatctagtgcgtatgcgtggtttctcgatatgttcagccggagattattttcctttagttttttctttatgggttacacacatttgctttgtgctgttaggcatttgtgctttggggccgcgtaacatcttttgaaggccggccggatgctaggccttggcgtgctagctttgcaacagtgcgatgtacatttagtcgcagcttccaattggtttccagaggcccttttttccgcccggtttccgttggtttctcttttcctttgaggtttttactttttactcgctgccatttctagcaaaagttctgcagcacatgtggtgtgcttgctccattctggtttctggaggaggacgtcgtcccgaatggcttgtctgcccttgctgtcaccacagctggtttctttctgaaaaactgaggcgcagacgagataacgcgcttgtctgcccttgctgatttaggcaaaaaggccttggcccctagcttgttggttcataggcgtaatagctgcagactttgccttgtgccgtgtggggtccggtcttgattattccctttgttttgaccaaggctagctaatgttagtgtctataacattatagaatgctactacaagcttctctttcacatgatgctaattaatctgcctattttcattcaatcggatgatctcactgtcaggttgcaattactcctgagcccaagacaagacggatcaacagggttctaatgacggagctgacaagcaagcaccgcgtgtcgtctctcggtggcctactggtcgcatacgatggcagcaagagcctgtacactgcaggcgagctgccattccaggcgatggatttctccatcaagctggggaaaccaccaagagaaacgtaagcatgtcttaactttcctgtctcgtgtgcgttctaggcctacttgtatctcaagtgcagctgctaattcacacttttctgctctgccttttttttatcttctacatttgaaaaaaaaaaagtgagtacaaggtcacgattcggttcgccgcgcgggcaaacttgtaccacctgcagcagttcctcagtgggaagcaacgtgattctccacaggacacaatacaagcgctcgacgttgtgttgagagagtcaccttctctgaagtatgatatcattgttaacgtctcttctctgttatgtttttactgctgactttgtttaatgtgatcaccatatatatatggatcttgttgttctacagctatgtcaccgtttctcgatccttctactccacaatatttggccaacgtgacatcggtgatgggctggagtgctggagaggatattaccaaagcttgcgccccactcagatgggcctctcactgaatataggtgcatattagttcaaaacccctctcttaattcatggttacaaaatcacgtaggccacactgcaattatatttttggtatagcacgagctcttgcccaagtggatatcacatttattgtgtttagttctgcataaagctactacccaacccatgtctgtctgtattatgtcacttgtttacctgggttatccaaatttgcaaagactaaggggagtgatttaaacacaagtcgactactgaacagaagcatatatagcttgtggtgaggttcagggagagaaaacttgcagcacatgagttcaattaggaaaagtgtatgcatgtgtgtgtgatttaaacacaagtcaactgctgaacaaatttgatgttattacagtgtagttttaaggtgaacacagattcatttgagacgttcttttccacagggttatcacttttatgaacccttgttgtacttgttgtgcagatatatcatcaacgccattttacaaacctatatcggtgatgcaatttgttcaggagtgtctgaatctgaggaatcccgaccccaatcgccccctttctgacagggaccgtctgaaggtactgcatttatcaaccaagaacgtatcatacacaaatgtttatcactactagccgaattgtttcgttctttccagcttaggaaagcattgcgcgggattcgtgttgaaaccactcatcaagagggcaaaaggagtgcctacaagataactgggattacttctgttccgctgattcagctcaagtacattgttcctcctcttcttccatctcctctccttccctccttcccttctagtgccaaatgatttactggtgtttgttgttttagctttcctctggatgaaggcaaccaaatgactgttgtgcaatacttttggggccgatacaagtatagattgaggttcacttcttggccttgtctgcagtctggaaatgattctcgccctatatatttgccaatggaggtaattttttcttatttgtgcataacaccaaatgtggaagtctgctaatgatatataatatgattgtaggtatgcaaaattattgaagggcagaggttcaccaggaagcttaacgagaaacaagtgactggcatactgagagctacgtgcgaacgcccccgtgatagggagaacagcatacttaaggtatttgtccagacaataggttttaacacaaccaaactaattgattgaaattacttgaaagtgcttattacatcatttttttccatgtgatcatgttcgttatatttgcctcattagcattttttaatgaatatgtattctatagatggtggagcacaacaactattcagctgataagctggcgcaggagtttggaattgatgttacagataaaatggtcaatgtgcaggctcgcgtgctacctccccccatggtgtctattctatttagttctcattttgatattttaccccctgtttttgttagttaatttcaactgtttatgctgttttagctcaaatatcatgaatctggaaaggacaaagcttgtgcaccaagtgttggccagtggaacatgattggcaaggtgattcatttctgacttggaacaaaaaaattctgttacctgctcatttttaataatgccacaagactataacaatcttgtcacaactgtgaattgtggtcgtagtcttttagtataacatggacgcacaaacagaaaattcttggattatgtattattttttttcagtctagagaatttaaatagaaacttggttggaagtgtgagctacacaatttgggggcttattccttctatccatgaaagttaaccagttctccctaggtaatctagtttatgtttttttaaacatgtccctctttctgatgtatgatttctgtttgtattttagaaaatgataaatggagggaatgttcagagatggacttgcttgaacttttcacgtttgcacattgatggagtcaaaaggttttgtggcgacttagtcaaaatgtgcaacgccatcgggatggtatgttcagcgcatatttgtacatacaagtcgcccatatcatcattcacgtcacactcaatttattttcaatctttaggttttcaatcctatgccagtggtagaaattctctcagcgtccgccaataacatagaaggtgctttgaaggatgctcaccagagtgcccgtgacctccagttgcttattgtgattcttccggatgttactggccattacggtatgcagtttttttgtgaaacgatgttatggtatgcacattctttttttacctagtttaggcgatgcacatttcctaagttatggcacgcacatctttagtatcgccctttatctcttgctgttaccttgtctcatggtacccatatatctgtgcaactctgcagggaaagttaagaaggtgtgcgagactgaccttggtatagtatctcaatgtctcaagccagacaaggtcgaaagagcaaacaagcagtattttgaaaatgttgcacttaaagtcaatgtcaaggtgggtttgttggcagtcacctttttctgttgtgcttaggtgttcaatggagagttatattgtgttttcttaattattaggtcggagggagaaatacagctcttcagcaagctcttacacgtcaaataccgttagtcaccgatcaaccgacgatcttttttggtgctgatgtaacacatccggcggcaggggatgattcctcaccgtcaattgcagccgtgagttccgttcatcttctgacagcaattgttcacttgataatttggttaatagtgtgtgaatttaaatgagcttccattgtattatctggatgtcattgtgctgatgcagttggcatgcttttgatgagtgcctgcaggtggtggcctccatggactggcctgaaatcacaaagtacaaagctgtggtttctgcccaaccgcccaggcaggagattattcaagatctctattgcacaggcatagaccctgagaagggcacccctgtacacagtggaatgatgcggtaagtcctttgtgttaattcagagtagtggatggcggtgggttctaaatccgcaacattttctgcagggagttgctagtgtcattctttcagaagaccaaacataaacccagcaggatcatattctacaggtaagtgcttccaacctccaattatgatgttattgttcattgtcagcggcgccttttgctgaatcgttttgttttctatgtagggacggtgtgagtgaagggcagttcgcccaagttctgatgtatgaaatggatgccatcaggaaggtgatgcctttaattcatcatgttctttgcctgtctaattctgctttaatcctattttggtgtattaacagtgttccttttttatggccaaaggcttgtgcatctttgcaggaggattatcagccccctgtgacatttgtggttgtccagaaaaggcatcacacaaggctcttccctgaggtgcacggaaaagagaccgacaaaagtggaaacatccttcctggtaagtgtgcctcacacacacattaacacatgcgtttaatagcatctgcgtttgccattgtgtttgattgtccccattctctcgatgatgcttccaggaaccgtggtcgacaccaacatatgccatcccaccgagtttgatttctacctgtgtagccatgccgggattcaggtacggtggcacccattcctttcactgccggttgggacatacactttgtgttgcattgactgactgtgagcattttgcatgtttttttcagggcacaagcagaccaactcactaccatgtcctcttcgatgaaaaccgtttcactgccgatgggctgcagctgctcaccaacaacctgtgctacacgtaagctcgacacatctccctctttcacttctttttttctgattcaggttaatctaccatcttgactcctattttgctagctagactaactccgatgtggtatctttgcctgtaaatgcagatacgctcgatgtactcgctctgtctctgttggtgagtttcttctccaagttcatctcacatttttcttgtaaaaaagagaactgcggtatgcaattatcttctgtggtactaatgctcgagtcctttcttcgcagttcctcctgcctactacgctcacctggctgcgttccgcgcacggtattacgacgagccatcggagggctcggacagcgcctcgatcgtcagcggtggcacccgggagtcagctgccaccggcgcaggagctgctggtcctcctgggacataccgtcgcctccccaggatcagggataacgtcaaggacgtgatgttctattgttg

SEQ ID NO: 976 - DNA, 3157 bp, Triticum aestivum
  source 1..3157: mol_type = genomic DNA
gaaaactgtccaggggagtgttgttcgaggagaggagaggggagggggagagacgagaaggggaacggaaaagaaagccaagccctctcttgcggaggccaacggcaaggcttcctcccttgcgccctcgatcagttcagcggttcggctcctcgggaccattgttggttcgccgaaatggagtcacacagtgatgacttgccaccaccaccaccactcccgccaaatgcagagccgataaaagctgagtcggctgatgacttgccaccaccaccacccctgccgcctatcaaacctgaagaagcaaagaagatctcaaagcctaagagggccctgatcgctcgtcctggttttggcaagaggggaaatcctatacagcttgtgacaaatcatttcaaagtctcgttgaagacgacagatgaattcttccatcattactatgtaaatctgaagtatgaagatgacaggcctgttgatggaaaaggtgttggtagaaaagtcattgataagcttgctcagacttatccatcggagctagcccataaagactttgcctatgatggtgaaaagagtctttttaccattggtgccctcccacaaattaacaatgagtttgttgtggttcttgaagacgtttccagtggaaagactcctgcaaatggcagccctggaaacgacagtccagacaagaagagagtgaaaaggccatatcagactaaaaccttcaaggtggagctgagttttgcagctagaatccccatgagtgctattgcaatggcactcaaaggccaggaatcagagcacacgcaagaagccgttcgggttattgatatcatattaagacaacactcttccaaacagggctgcctgttagtccgccagtcactttttcacaacaatccttcaaactttgtggacttgggtgggggtgtgatgggctgccgaggtttccactcaagctttcgagccacacagagcgggctttctcttaatattgatgtttctacaacaatgattgtgaaacctggccctgttgttgattttctgctggccaaccagaaggttgaccaccctaataaaattgattgggctaaggccaagcgtgcacttaagaatttaaggataaaaacaagcccagcaaatacagaatacaagattgttggtttgagtgagaggaattgttatgaacagatgttttccctcaagcaaaggaatggtgggaatggtgaccctgaagcaatagaaatatctgtttatgattactttgtgaagaaccgtggcattgagctgaggtactctggtgatttcccttgtataaatgttgggaaacctaggcggccaacatatttccccattgagctctgccagctggtgcctttgcaaaggtataccaaatctttgagtaccctacaaagaccatctcttgttgagaagtccaggcagaagcctcaagagaggatgtcagttttgtctgatgtactgaaacgcagcagctatgatacagaacccatgctgaaggcatgtggaatttcgatagctcagggctttacacaggtggctggtagggtactgcaggcccccaagctcaaagctggaaatggtgaagatattttcacaaggaatggacgttggaatttcaacaacaagaggcttgctagagcttgtgtggtggacagatgggcagttgtaaacttttcggctaggtgtaacaccatgaaccttgtcaatgacctcatcaagtgtgggggcatgaagggcaatacagtagaaaaacctcatattgtaattgaagagaatggttcaatgagacgtgcacctgctccaaaaagggttgaggatatgtttgagcaagtgaagtctaagcttcctggggctccgaagtttctcttgtgtattcttgctgagaggaagaactcagatgtttatggtccatggaagcgaaaatgccttgctgactttgggtttgtcactcaatgtgtggccccaacaagggtcaatgaccaatatctgacaaatgttctgctgaagatcaatgcaaaacttggtggaatgaactcactacaacaaattgaaatgtccccaagtatacctcttgtatcaaaggtcccaactctcatcttgggaatggatgtgtcccatggatcccctggacagtctgatataccgtccattgcagcagttgttggttctcgggaatggcctcttgtctcgaaatatagggcttcagtgcgctcgcagtcaccaaagctcgaaatgatagattcattgttcaagccacaaggaactgatgatgatggccttgttcgggagtgtctcattgacttctacaccagttctggaaaaaggaaaccagatcagatcatcatcttcagggatggtgttagtgagagccagtttaatcaggtgctgaacattgaattggatcaaataattgaggcctgcaagttcttggatgaaaattggaaccccaagttcacgctgattgttgcccagaaaaatcaccacaccaaattcttcatacctggatctcctgacaatgtccctccaggcactgttgtagataatgcagtctgccatccaaggaattatgacttctacatgtgcgctcatgctggaatgattgggactacaaggccaacacactaccatatcctgcatgatgagatacactttgctgcggatgacctgcaggatcttgtgcactcgctctcatatgtgtaccaaaggagcacgacagccatatcagttgtttctccaatctgctatgcacatcttgcggctgctcaggtggcgcagttcataaagtttgatgagatgtctgagacgtcgtcgagccagggcggtggccacacctctgccggcagcgctccagtgcaggagctgcctcgtccccatgagaaagtccgcagcagcatgttcttctgctgagccagccagccagccgcacttgcgcgttccaacttttggtgatgcgcttggttatctagtactagtagtatgtagtagtggcctgtgatggcctgttggactcctgggatgttgtgttcctaagctggttgctgcacttggtgcctcagaacctttgaatcctgtcagggtgctgcagttgaacctttactatcgaaccatctaatttgttgctttccaaaaaaaaaaa

SEQ ID NO: 977 - DNA, 852 bp, Triticum aestivum
  source 1..852: mol_type = genomic DNA
ggcacgagggtcgatcgattcatccaagccagagttgagcaatactagcagtgagatttacagtgatttcacttcgtgtttgttggtgagagagaagagcagagaagacaagatggcctccaaccagaaccaggcgagctacgcggccggcgagaccaaggcccgcactgaggagaagaccgggcagatgatggacaaggcggggcaggccacggaggccaccaagcagaaggccggagaggccaaggacaagacggcccagacggcgcaggcggccaaggaccgcgccgccgagagcaaggaccagaccggcagcttcctcggcgagaagacggaggcggccaagcagaagaccgccgaggcaaccgatgcggccaagcagaaggcgtcggagacggcccagtacgcgcaggagaggtcctccgacgcggcgcagtacaccaaggagtccgccgtggccggcaaggacaagaccggcagcgtgctccagcaggccggcgagacggtggtgagcgccgtggtgggcgccaaggacgccgtggcgaacacgctgggcatgggcggcgacaacaccaacaccgccaaggacagcaccaccgagaagatcactagggatcactagacgcatacatgcgtccaatcttgctaatttgcttcctttactcgtttggtcgttcgcgggccctttacatatttgtatgtttccctcttttgtgatttccgctcatttagtgtaagtttgccttcgatttgatgtactactcgtgtccggttctgtaatgagttacttataatccatgttttactttggtgtaaatggataacgaggacaaaaaaaaaaaaaaaaaaaaa

SEQ ID NO: 978 - DNA, 6697 bp, Triticum urartu
  source 1..6697: mol_type = other DNA
accctctcgttcgcccatccatctcccccaactccctccccagatccatccacttctcgccgccgctgctccgcaatctgccacgccgacggcaacgggagcgacggacatggccatgcctgctgctgctgctgccggtcccgggctggcgtcgacctgattccttcctttcgccggtaaagaatcctaccctaatcggacggatcgctccctccctccagtcgtttggggtttcgtatctgccttgctgtggcattgagcagccggggcccgaaccgtacctaatttgttgccgtctgcggttctgctaggtttgttcttttgcggcgcgcgaggtcgatcgtagttttctccgtgtagattagatcggtcggagctagtccgatggggtttggtgcccaggctcgagcgcaacttattttccctgaattttgcggggttcaactaaacccacaaacaccacgttcagtccgtccctcaggatgcaagcggacggcgtccacatttccccgtagcaaaaattgcattaatctctattactccctccgtagagaaatataagaacgtttaaatcactacaaagtttttatgttagtttacagagggagtactttaatataactgtactagtttaatttctatgttcgtggatggtcccaaacatgcggacatgcggacgccgtgtgcttctatccctacaccgcccttgctcaccaataatagagagggtgttgcatttgtcccctgcatttttttcggaaggtgttattgaggtaggtgggaaagcgtagtgggtgtacaaattgtggaaatgtacgtctccgactgttttattgattgacatttttcttcagaaatattaaaaccctacagcagataaaatgtccatgttgatgcaagggatttacgatgctctaaatcgaaaattgccatgtagtagtacaaaaaatgcctgaaaaattgccacactgcacagagtaattaccatgcgtttgattggaatttgattgggattcgacagtactaagggcgttcgctgggtttacttaaaaatctgacatttgctgggtagtggaatcctttttcttgctgaagagggtttttttttggctgacatgtttatgctattgcattgtaatgggattttgtcgcaacagttatagttttgggtgaaactgtggtacatggatctacttagttttgggtgagaccatttgattagagattgaactaaagaagtctaatataaaaactgcaacctgaatttcttcctaaaaataagacctgccatatgtgtacacagatctgtctatactttccaatgacttggctggttcttttaccatgattatgcactgctgcagttttcatatgcatcctgaatttcttcctaaaaagaagaccgccatatgtgtacagatctgtctatactctcgaatcacttgactgatttttttaccatgattatgcaatgctgtagttttcatatgcaccatcaccatgggtggcaagactcttcaggtgtcaggatttcctgcaactgtcaatgcagaccatgtcaaggatttgctggaacgaattgttggtgtggataacgtctgtgtggttaagctcaggcctccgaagaacaactctgcaaactcaagatcttttgccattgttcagttccagaccgaggcacatgcttcgctggtggtgaatgcggctcgtgggaatgcacttaggagtggaagcaattatctgaaggtccgacctgcggaacgtgacattgttctgagaccaagaactacgatttttaatctacggggtgcaacattgcattttggctgccttctgagggaaagnnnnnnnnnnnnnnnnnnnnnnnnnnnnnnnnnnnnnnnnnnnnnnnnnnnnnnnnnnnnnnnnnnnnnnnnnnnnnnnnnnnnnnnnnnnnnnnnnnnnnnnnnnnnnnnnngtaaagagttttatctgttctgtggagcggaacagacgtttctgctgagtttggatttgctatgaagaagattgacttttgcctgacctacaaattgaagaaatacagacttgaactttcatatgagagcatatgggagatccagcttcatgatccacctggatcacaaaaaaagttccttttgattcaggtatgtttagctgtacaacacttgtttatgtatgctgaacatccttttcatgatatcattttacacgtacctgcaaattagtttaccattttgttgttgttgctaatttatgtgtttgctcctcattttgttttatgtactctgaaatgtttgtgtgttgttacaagtgcacaacaataattttcattttctctagagtactgatataatgataaccaatccatatgaagttatgctactagagttttacattagagcccaagatgatgggatgggaacaccaactgcagtatttccttgataattgcatacctctttaaaatgccgatccatctatggaacagctttttagttagttcaagttttttctgtttcttgaaagcttggagctctagatttgtcataacctcagtttgagaatttttgtcaattctcaggttctggctgctccaaaaatttacgaacaaaacttacagcattctggctctatgtacgacgatccattattcaactattttagggatgatactgatgatcagtggaccagaactactgattttactccattagccagcattgggcaatcatatattctgtgtctggagctaccacatgattgtgatctccccaacattcaagagtactttgtttactataaagaacacaagcgtgactttcattgccatcgtggacattcatattcaagcaatacttgctttgctccaattgtgaaatctctttatttcactgatatcccctatgagatactcttcaagatcaaccacatggttcagaatgggacacttagtgggccgacacttgatgacaacttctaccgtctggtcagcccgggatatgtatgtattgaccatataaagcgtgcacttgaaaatatgtcatacctaaaaaagacttgcttgaatccaacaaattggttatctgaacaatacaaagaaattaagagatcacgctacatgttaacatcaccaaacatagctctgaatgatgatgggttggtatatgtttacagggtgcaaattacccctgcaaaagtgtaattttatggtcctgaaattaatgtctcgaatcgtgttgtacggaattacgctgatgatttggataacttccttcggatttcatttgtcgatgaggactgtgagaagcttcgttcgactgatttatcaccacgttctgctcccggaaataatgcaaggagaactgctctgtacaacagaattctgtcggtcctttcaaatggcatcactattggtaacaagcactttgagtttttggctttctcttcaagccagctgcgggataactctgcgtggatgtttgcttctcgtccggggttgtccgccagtgacatcagggagtggatggggaacttccgtaatattagaaatgtggcaaaatatgctgcaaggcttggtcagtcctttagcgcctcaacagaaaccttgaaagtacataagtatgaggtgcatgtaattccagatataaaaaatggtacgaagtatgtattctctgatggaattggaaccatttcagctgattttgcagacgaggtgtctaagaagtgcaaattggcccgctttactccctctgctttccaaataaggtatgggggttacaaaggtgttgtcgctattgatccaacatcacactggaaactttctttaagaggaagcatgtcaaagtttccgtcagacaacatcacactggatgtccttgcatacagcaagtaccagccatgtttcctgaatcggcagttaatcactcttctttcaactcttggagttagagataacatatttgaactgaagcaacaagaagttgtgaagcagttaaacagaatggttactgaaccacaagctgctattgatgcaattgaacttatgcccatgggagagattaccaatgttgttaaagaattgctgttatgtggctacaagccggatgttgaaccatatctttctatgattctacaaacctttagagcatccaagttgctagaactgaaaacgaagtcaaggatattcatcccagaaggacgagcaatgatgggatgcttggatgaaacccacacactgaagtacggagaggtattcattcaagcttctaatagtgcaaatgacagtgacaagttcgtcgtaactggaaaagttgtcgttgccaaaaacccttgcctccaccctggtgatatccgtattctcgaggctgtttatacccctgttctggaccatatggttaactgtgttgtctttccgcagcaggggccaaggcaagtatttacaattgcatcgtgttcttctatgtttttcgaatatgtcttttagcaaaatctcatttctgtaaatatgttcttatttggtactagaaatcaacagtggaagataaaacaggtctgtacattttaaatcgaataaacttttactagttggcactcatggatgtcatattattacttcgatatcgtactcttattttctttgccctttgttatcgaaatcagcgtcgaatttggttcgtgcaggcctcatcctgacgagtgttcaggaagtgatcttgatggggacatatattttgtttcatgggacccagatctcattccaactcgtatggtggcacctatggactatactccagcaccaacagaaacattagatcatgacgttatgatcgaggtattttaagtttttagccgatattattcatattaaatgctactcatgataacggctgtacatccattgcaatgaactgtcatttagtcgtacttctgattgtgagtttctttttgactctgcttcttgtgtttctgaagagttgactacctgaacctatttcctgagatctgcatgttttagtttgtttgtttgtacttttccccctgatacaaaatgtaggcacttgtagagttggttacaagaactaaggatggtggtaggcatgttacccttcatttgtttcaaatactacccttcatttatttcaaatactactttttccctcccaaatacagtaaatgctagaattacaggctcaattgttgatgaaatttacgtggggctaattaggaacaacatgagaagaactgtattgggagtgtagacttaggatcaatttgaaaagatagaaatacctgtgttttggatcggaggaagtaggaagaaataaatctatttcttttctgatgagtacatacattactacttttaaggaaattccaagcatcctgtaaaaaaaatctgacaccctgctttggaactattctaatattatgcaggaagtacatgagtatttcgcaaattacatagttaatgagagtctgggaatcattgccaacgcgcacgtggtctttgcggatagggaaagcttgaaggctgaaagtacaccatgcattaagctggcagagctcttctccgttgctgttgattacccaaagactggagtgccggctcaaattccgggcgaactacatgtgagggagtatccagattttatggagaagctcgacagggtcacctacgtatctgagggagtaatagggaagctgtatagggagattaagaagcagagccctcacatagggcatttcacaaaggatgtggcaaggcggtcttatgacagtgatttgattgttgatggctaccaagactacatcgacgaagctgtgtggatgaagggagagtatgacttcaagttgggtaatctgatggagcactatggaataaaaagcgaggctgagataataagtggatgtattcttaagatggcgaagaattttaccaagagtagtgacgccgatgctattagacaggcggtgaaatcattgcggaaggaagcaaggtcatggttcagcgagatgaacgccagtgagagcggggatgttcctgaagccttgtatgccaaggcatccgcttggtatcatgttacctatcaccccgagtactggggttgttacaatgaagtatatggtcggccacacctcatcagctttccatggtgtgtctatgacaagctgcttctcatcaagcagagaaagaaacttcgaaggaggatgcagcctcatgtgcttgatctccagaatagcatgaggcgaaacaagattttcggttgagtgctaccatcaggctgtggtttgcgttgtatatatatttgaacatgtcgattctcgtgctagaatgttcgtcgaaggaattataattgcatatgatacgtgtttgatggacatgtgtgtatgaaccttggggtcttttggttgccgtcgttaaatatatttctgtggtttgatctgtaatcgtacctgcttttcccctgtctttttggtaatatgcatgttcatattaatcctgtgtttgaccagtgcttggtgcattgaaatgaatggaggatccaaatttagagattgtgagactgctgataactggtggtccggttcagaagagaaaagtactgaaaccacaaatagcgattcaactgatatggtctcgggtgtacttaacatgcttcagaaggtggtctcgttgagaaatgcaatgccatga

SEQ ID NO: 979 - DNA, 17107 bp, Triticum urartu
  source 1..17107: mol_type = other DNA
tcttgtctatctagccgtcattcatccagatatttcatatcaagttcacattctgagtcagcactccccttcaggttcactatggtcacctccttttatttctgcgagatctctcttgcatcttttctttcaatgctccagtttgctaaagcttcatgctattcaaatgctacttggattagctatccgaagggctgccaatcgcattttgcttgctcattgcctggaagacaaagaaacatactgtagtttcctgttcgagtgtagaggcgaattgcgagctatgattctcttgacagtagtactgacttggctacagtggttgtccgaggattttggtgtttctgtaactacaccaacttctctttgtctgacaatacatgtgttatcaacattgcgcgcgaccctatgaagcgtgagcttaccaagcatatggagctgatgcttcatgcggtcccgtgcaggatcaagtgattgcgctctttagtatgtgttttcccagcttcagttgatggatttcttcttgaagacccaaactagagcacaacacagcttttacctgtccaaattaggtggtgttgatccaccacaagtttgggggttgtgggttttagagttgtatatgtttttccagatattaactacataatccctattatatacttataagagattttttgcatatctaccacacctgtacatgattagctacgtgatccctattatatataagagtttttctgcatatttgccacctgtacgtgtgtgtgtgtgtatatatatatattggcttatggtctcatggaaatacaagttgcatatttctcacagttatagccactccttgacgccttttgctgttatgtcttaatccttctgatctgcaagcctcttctcttgttcctctacctgcttgttacaatgtctattgccaaaggcacatgacacttgtgatacgctattggtttgctgggactctttttagcgagcaatggtaggggaaccccccacctgaagtgaaaattttattgaacaaaaactcgatatgtacaaggagatttacgacgcggcaagctaagagaacttatgccagacacacgggagcgccattcgaccagcatgccattgctgagacgatatgagaagtgcaaatccgagagggcggcgtgctccaggatcatcctccaaacagcgagtggcgtgagatgctcaccattgaagactaatcggttctggcttttcagaagcaccgagcgcaaggaggaccaaggtgtggcggatggaatggtgcagatgcgctatggactgctcataaaagacgcagaaccggtgaaagagcacaccagaccgggctaggaccgattgtctgctgagatgccaagccagaaacaaattaaataggacgtggacaagaaccttgtctggcaccgtgtcgaaagggctggaggctgaaccaatccaccattgtcagaataggaagccctgtatgcgtgtgttgccatggcgagcgagccggaagaaggtctacactttctgcagagcaaaatggtcccagttaatgtttgccaagatctaggcctatactggagcgacaaagaatggggtaggctgctgcccatgacatgcttgtcggctttgccagccacaagtcggatggacagccaattggtcgagctctgcatcagccgctgtggtgaatggtgaggcaagattgcaagggtaggttgagggaaaccccagcaatcacctcagcaatggcagccttggcacattttttttttgattaatataaaatgctacagctgttaccggggatcttagaaattagttgttggactagcattgcactaacttgaaatattaggttggtctctagtgttgcctactccctgcaatgtaagtttttttttttttttaccatttgtggtcatgcatctgttcttatgttttatatgacaggcgggtctaacaagcttaattacaccaaatgtatcaacagccttgaagaattattgcatgccaaggtacatactactagtgttccccaagagttctgctgggtttaggaataatacttattgacatttgtctttgcaaaacttctctcatgttggataggtctgttcggttgataatgcagagctggaaagtgtgcttgcttttcctgatatggaggtgtacacttacgtcccgcttagtcactctaatcttactgtaacttacaacaaagaacttgatcgctcaaagcttgaggtaaagttttgttctgctatatagtcgattattattatttcaaattccaattatacaagcttgtgttttctgttctttttcatctcctttttgttatttctatgagtttgaaacagagtgaacgcatactacgcgagagcctatacgatttcaaggattctcagaagaaactaaagtccctggggaggttgcatggaaatttagtattctgtttgcaagaacttggttcgtttggagctctgcaagtaagttgacactgttttatcaaatacgttgataatgaaatatccttaagccttgttgtcggattcactctaatttggaacgtcctttctcttcagttagttggttcaatttttttcttttggggtgtggcttgggagctgttatcggatgctcctccctcgcttttatgtgaaagcgtccattttaggaacttcgtaaatacaagataaataatagattgtgttgtgtttaataaagaatgtttcttgagaatttgttatagaattagaaataacactatttttgggtgaaagtttatattgttcatatgcgatgcgatgttcacttagcttgtaacaaatgttccgagtggatttactacgagcctatggatgtacaagtgcttcatacatgcatacatggtgtttccgtagattgcaagaaagttttgttagttctcctgtggtggcagcnnnnnnnnnnnnnnnnnnnnnnnnnnnnnnnnnnnnnnnnnnnnnnnnnnnnnnnnnnnnnnnnnnnnnnnnnnnnnnnnnnnnnnnnnnnnnnnncacccccccccccccccccccccccacacacacatgggggatcacaatggtagctgcccttgtcatctaccgactccaaattcaaatccgcctaaggtgctgattccccactaacggactctaaattctgcccaaggcgaacctctgctaagtcagattttcctcctctagttggctgccgtttgagtgtctaaccttttgaagttgggagcataacgtgtacgcaggcgtgtatgatcttgtttgtcatggattctatatttcttgctttaatctttgcttatgcttttatttgctatttagttgtagtgttcttgactgttttctcctttgttataccacctccattcctaaatataagacgttggggtagtttaaattaaactgccccaacgtcttatatttaggaatggaggtagtacaagtgttttttttttacttttttgttgcctccttttaagatagcatcagatgtgttattccctattttgtttgattttagcgcaggctgcaaaggctttcctttcatctgatggtgatgttttggacagaaaggagtctgacatgaacgacaattctaccagatttaagcatcattacctaaacaaagcaatttctgttctgaattgcaacatattagacggtgagttgttatgcgtgttctcacctaattgttctccttttacccctatgttagttcctagatttatctggtccaccttccctataaattctggcagtggattttttttttagtttctaacaacaaatcgtcctggttattggctggatttgatatcctgcctgtaatgctgatccaaaattttcaaagcataaaagagaaatatgaactcattcatcttcctaaaataacaatatatcttactgtttccttaataacaatcagtactctggaatcgttgaggatatgtacctttcgataaggtttttattggaaatagttgccatcttaaatgcatattttttttttctgattagcccttcacgaatctgacaagacgtgctttctaggtacccatgatgattcatttcatctagagatgctagaagaacctttcttctcaaataaaattgtggttcttattaaaattctctcgagatacaggtgagcgtactcgtcagtgctactatcttttttcataacattctttatgctttggatttgtacgtacacattatggtaccggagtatctgtacttaatttagggtgtaacgaaatcttgttactgattgggtagcagtaattcctttccaccggcttacattttccacatgataatgtgaaaatgcaagaagaatctagctggaaaccactattcaaacattgtatttataaccacttgagaaagtttcaacatctatctgttctcatcatcctgcttattttgctctggtttctgcaataagcaggctagaggaaaacatgaagtgcatagttttcgtgaaaagaataactgttgcaagagcaatagcacatatcctccaaaatttgaaaggccttgatctttggaaatgtgagttccttgtgggacgccactcgggaccaaagaacatgtcaaggcagaagatggatgctattgttgaaaatttctcttctggcgaggtataataattggtgtaattaggcattcataccttctacatgaattcttccgaagacaataaaaagtgttctttggataactattttgaatatgtcacatcctgcatttattcttggcctgctctttcttcaagagtaagttaacattttttgtgatgtaaatatgtaattgagcacacctgggagcataatcataactaggtggttcgtactgatcttggttgttgttgaggtggatttttaatttcttattggtgcgcacctaactatgaatataactggttggcatacaacatcagggccagcatacacagactctgagatccaccagttgagtcagcgagtcggcagtttagtcaagtataagccaaattcagtttaactaggccatgggctaatcgtttctgatggacattagtgagctcctatgttgtaacggctgagtgagtaggcacttacaatatacaaggattgacacgggacagactgaaggattggttcttggcttgtaaagtgttgttagattatactaataataaagacatagggttttagtaggtctttttgactcaagcagggttctatcctggataggactcgtgggactaagggctttaggcctacatttgtattatccttgagttggtaatgcatgtggtaaattacttgcgatacacgccccaaaatctaacgttggccttatacccgtatatctactatgcttcttgcatcacaattcctttgcctttgctgtttgcaggtgaatcttttgattgctaccagtgtaggtgaagagggtctggacattcagacttgttgcctcgttgtgcggtttgatcttccagaaactgttgccagttttatccagtcgaggggacgtgctcggatgacaaattctaaatatgttgttctcctggagaggtgatttttccattaaatagatagacaattggtgttaatattataggtttgattgtactttagtccttgatttttgcccttcttattcattctgatacataccaggggcaatcattctcaagaaaagttgcttaatgactatattgatggtgaaggcattatgaatggagagatagacttgagaacttcaaatgatgtgtttgatcacctcgaggagaaaagttatcgagtggaaaaaacgggtgcttccattagcactgcatgtagtgtatctctactgcatcgctactgctacaaccttcccaaggacatgtaaggcctgctgtgtacatcaacctgttatgatcccatgcttttattcattagttctttgttgtactaatatgactaaacttcttgaaggttcttcaatccttccccagcattcatctacattgatgacactgaggggataatctgcagagtaattcttccaccaaatgctgcttttcgtcaagtggatggccaaccatgccaatcaaatgacgaggctaagagggatgcatgcttagaggcatacgtgaaattgtatgaattgggtgctttgacagattttcttctgcctggttcaggttcaggaaagaacagggcatcaacaacaaacggttcagcaagcaacagtcatgatggtatgttcactcacttgttcttacattgtcataatactggtgattcggctcagctattgtttgcatatttcagatgaaagtctaagagaagagcttcatgagatgttaattcccacaattctcaaaccttcaacatgcaaactggactgtccattgaacttgcatttctactatattcaattctttcccataccagcagatagacattatcggatatttggtctttttgtgatcaactcccttcctatggaagctgaaaagttggaggttgatttgcatctggctcgcggcaggattgtgaaagcaggaaagaaacaatttggggcggtattcatttgaaacatttagggacgatatcatttgacgaagaacaggcaccgtcttgctcattttttcatatgttaacatgtgatcatttattgaatggcgtataaaatgttaacattgttttttcttgtcagatgatgctggcacgcaatttccaagaaatgtttctgaaggttctcctggacagatctgagttcactgtatctcatgttatgttgttgggcaacagtgaaacgctacagtttaattcaaccttttacctgctgcttccaatcaagcaggaattgtatggtgatatatttatgattgactggcaaacagttaagcgctgtttatcatcaccggtttttaaagatccaactggtgtgtctgcgcatggatcatatttgccagatgagtctttaaggcttcttgataatatgtacagtaaaactgatgtcgttggcagtctaatctttgctccccatattaagacatttttcgtcattgatgtcattctgaatgaactaaatgctagaagtgaatacgacggtgctacttatgaagatcattacaaggaaaggtaacaaactgaaggattatttgcatcccccttctttgctttcaattctcatgctaccgtcattgagcactcactaggtcatgtatagctacataaccaaccttaagattgcgagctatctgtaccatttatgaatatacaaatttatgtttagtatgataatttgtatctacttcacctatgtcttctaggcatagccagtcccaagcccaggtaaaggaggagggttgtgataggcttggcgagccaacgtaaaaactagccagtcccatgggtatgaaacccatttgagcgagagtagtactaggatttcatatctaagggttgtcctcgtgaaagggtttcatatctaagggttgtgataggcttggcgagccaacgtaaaaactagccagtcctttgggtatgaaacccatttgggcgagagtagtactaggatgggtgacctcctgggaagtcctcgtgaaagggttttatatctagcctaccccaacttgtttgggacaaaaggcttagtaagggaggaggaatgtgtatctacttcatgttacgaaaagtaggccatgcaagtcaaagatataatatcatgggaccaccccagtagaaatccccataagaagctttagttttgggaaacatgttagcaaatgtgctgcttctgtcctggctttacaagtagtctatgtgatggtcgtatgataggtccactgaactgatcctagtcatccctggtagccttttctcggcaactaaccaactttttttataagcagtttaaaagaaatgttgcgatatttctgcttaagtgctttattgatgttctaatgaactgatggacttttcaaatcaggtttggtatcaaactatcacatcccgagcagccacttctgcacgctaagcagctctgcaatctgcataatttgcttcatgaccgattacgggagaccacaggttacactttttgtcccttcagaactagtacctttataaactgtttcctgttttggactcttctttatccaagcatcactattttgcttagcattaaaatacttctaagtgttcaacttgccgtaaagtgaagaaatatttgtgatggtcgtctgtagtttttttagagggcatgcatcttttcattaagaggagaagcaaaacataagtacaatgttaggaaatatgcaacttgtctttccagatgaccatgggccgatcatctctgcaggagtgtacaatttttaacacacgtgtcgatcgtctcttaacgccacttgcaccctgtgatggtagtgagccaatattgctctatgtaaattcttgctgtcaaattttcttgaaccgcttgtgaattgctttcaacattctggaactacttgtggatgcattggacctaggggtgggcatattaaccgagaaccgttgcaccgaaccgaaagaaccgggaccgaaaccgaaaagtttggttcctatttcggttattaaatctatagaaccgaaatttattctctaatttcggttttaacacttggttaaccgaaaagacctaacaacccgaaactacagagcatgcctcgcacctccgtatttttctgttgaagaaatacaccacacacttcctgtattctgtatccccgctgtcctaggccagctggcccagctagcccaacacggcagctccaagtctctctatgcctttttcacttatctcactttagccacgtacacgtctggtatggcccaaaaagtgtagcaatcggcccatgcaaaaataggtttactgtagtaccacatcggatagccactaagaaaggaagcgtgtgaaaggctataaaaggtactagctagctagccatgtttcatgtgcctgctcgtacggaaacttgcggagtaaggccaaggaagaaaatgtatccgtgcgcatgaagttcggatctgttcggttggaaccgatgacagaaccgattgttcggttccaagaaaattcggttacctaattctgcaagagccgattggtctgcaatttttagaaaccgaaaaactttgtgacctgaaaaaccgaaccgatcggtccggttagaccgaatgcccaggcctaattggacctagttcttgcttctctggtttaagcttttgagcactgttgattcaatccatttatgaattgtattctgaatatactgctctactatgattccttaaatgtaccctatctaggtatagtatttctgatggtgttccttttcttattttgttatttgtatttagaagaaggtcgtgaattgatggagcactttgtggagttgcctccagagctatgttctttgaagataattgggttttcgaaggatatgtgtagctccctgtctttgttaccatcgttgatgtgtcggttggagaatttgctggtagctattgagttgaaggatgtcatgttgtcttcattctcagaggcttctcaaattagtgcctctggtgtaagtcatgcaattttcgcacccttcatgctgaacttctagtttgaattacctatccatgctgcaaatgatgttaatctatttcagatccttgaagcacttaccaccgaaaggtgtttggagaggatttctttggagcgctttgaagtcttaggtgatgcttttttgaagtatgtagttggacgtcacaactttcttacatatgaaggacttgatgaagggcaattgaccagcagacgttctgctatagtgaataattcacatttatatgagttatcaatcaaaagaaatttgcaggttagatattgttttcagtgaacccaatatctgtttcccttccaagttttgtgtgacctatgggttgtgttatctttgtttcaaatgtagaccaagttcagtaggctcatcttctgcccatgttatgccttgatttgtctgatcatgaccagaacatgtagggaagagctagatcagggtcgtcaagagagaccatggacaaagagaagagataatcatttttatttgttgtcaattgattgcaccctatgagtttatatagcaccctactcaatctcttcagattcttgactggatacaactccttggataacccctatcgccagggtttctgacctagtacatctcatttaaataaaaaggggttaatctcaactggattagtgtctaaccagacctaggacaccagctcggcttgactagctgagtctaatacaacttaaaacggagtcatgcaggattagctctgcctcttgagggccggtcctggggcgacagaactggtcgcatgtggctcccatgtgggttcaccattggtaccctatgcccaacacaacagctttttaaggttaaaattggagagggttttcccgcatctggatcgatttcacagccttcagttttttttttcaaaatgtttcaaaaggcgctaatgcataacaaatcagcttagaaagggaaaataaagtgacaaacataattgtcagaatgtgtccagcttctgcggagccaaccattcaagcgatgaaattaaaatccaaaactacaacaaccaaggactgaagctggtccaaccagtgtacagacaaagggcattcaccctggagatcacatcaccatcttgctagacaaatcctgcaaggagatgacacatgtatgatgatgttgcgggatctaaccattgattggcagattgagagtctgcttccggatagtaggtaccactgcacaagaccgccgtaccctcgtcggatccaatcagtgaaggcctggtctcaaacatgaagacagtgaagaagaccgctgttgccagatccaaccattgaaggcccgatcaagggtttctaccccgtaaaggatgaaccattgctctaagctgccgtctatgacagctgataaagtgtaactacaatcatcacaagaaaagcaagattagttcacaatctgccagagaaggccttttctagatggactcgccatgtgactatcagaattgaacttaaagctgcatgtttctgtcaatgttgcgaacgatagccaggcatatactcattagcgtaactgaacgatagcctactttggaatagttactgatagtgacattatagcctttatgagctctgtattatcttggcctgaccataattatctacagctaataaagtgaactacaatcaccacaagaaaagcaagattaagccgcaatctgccagaaaaggcctttcctggatggactcaccatgtgactataggaactgaacttaaagccacacttttttgtcaacattgcacatgatagccatatactcgttatcctccttacttaggaataattgctgattgtgacattataactttgatgagctctgtattatcttggactgaccataattatctacgacggtagtcaaacattctgtttatccttatgatctaatttaagtacatcctcttatttaaaacatggtttgctgccttgtaacattttaatagaggtccatgatccttgtttctgttgcaaaaaaaaaatcattacacaagataatgagttattttccctgtcaaatacctgccatgaattctgtagcgtaactgaacatctttttttttgcatgtctgtgtaaacttaggtgtacatacgggatcaacactttgaaccgacacagttcattgcactgggaaggccttgtaaagttgtttgcaatgctgacacagaagtgaatatacacacagatagtcgagaaaactgtaacttgaggtgtacaaagtcgcatcattggttgcataggaagactatagcggatgctgttgaatcgcttgtcggagcatttcttgttgaaggtggattcaaagctgcatttgcattccttcactgggtgggaatagatgttgattttaaagattcatccctatatagagtattagatgcaagctccatcaatttatctctcacgaaccacaccgacgtcggtgagcttgaggaattaatcggttacaatttcaaacacaagggtctaattctcgaagcatttgtgcatccttcattcaataaacattctggaggatgctaccaggtcagagcttcttttttcttgcattgtcattggtgaactgatgtagtaatcaatgatttactcggctgactatgttcttttcgtatttgatcagaaattggagttccttggagatgctgttttggaatatttgataacctcgtacctctactcagcttatcctgatctaaagcctggtcaaataaccgatttaaaatcgttagctgtcagtaataattcgcttgcatatgtggcagtccagaaaggtatccataagtatcttataaaggattcaaattatctttcgtcagcagtgaataagtttgagaattatattagacttcccaattcagagaaagacttggtagaagaaccagcatgcccaaaggtattgttatatccttgtaactgctacgcctctttagataacccatttttagcgtgcacaattactgctaaaatatagtgattattaaagttttcgatataagatgggatagtaggggtcagccgacttaaaacacaaaacaagtattatcattatcaataattgtataggaatcatacattttttagtactatggttatatgattttcttgagtaactagttgttgcatttgataggaatcatacatttttttgtactatggttatatgattttcttgagtaactagttgctgcatttgatgtatttgatttctgtttgacttgtaggatttctttagcaatcacatactttatatggcataacatttttatggcaaacacttatatccttttactgtaatcttgcttgcaggttcttggtgatattgtcgaatcttgtgttgctgcagttcttttagattcaggattcaacctgaactacgtttggacgctagtgcttatgcttctaaagccagtgttgagcttctctgacatgcacatgaatcccatgagagaaattcgggaactttgtcaatctcatgaacttgagttaggccttcccgaacctatgaaagccgatggagagtaccacgtcaaagtggaagttaacataaacagccaggtgataagttctgccgctgcaaaccggaattcaaaagttgctaggaagtttgctgcacaagaaacactttctaaactgaaggtatattttggttacttggccttctatttttggacttgccacagaattgtgacgtttgagccattccagttgggtgcacaaaaagcaatttctaaactgaagatctgcctttggtgcctttgacttttgttttgcaattaccatgaaatacgataatctcaatggtttcatttgttttttataaactgtcaacatgcattatggtatttggtttaaatattctggtccatcatgggatgataccatgattttgatgggatgacacttcccatgtatgtaattagcattgtgcttacgagggatgaggtggcaatggaccaacacattccattcctaaattcaaaccaaacaagtgcgcctcattcattttccggttccttgaactaaacactttatatgttcatgaccgcagataaattgcacacctaataaccaaactatgctgcacatatctaccacgatcgccgcaacgcatcgaagcttgccgccatatcgagaactgcatttttcatccccaaattatgtgcttgaaagacaaatacatcaaatgccaatcctttttttttcctttttgtgtctgggtatcaccatgacaacctcacgacattgacaaggtagaagaggctggtgctggtgatcaggaacaacgatggtgtgattagggttaggcgggaaatgaagctctataccatgtaggaattagaggaaataattatgtgtgtggattacaatcccaaccagactttaatatgtatacaaccagccagtggtggtgccaggactacaaacatgtgatgtcaaacatatttctctctgaatcttatattatttcttgtatttgcacatgtaatttgtatgtaaaggttttgctcaaaacctgtgtagtcaattgactatgcagtcataacatggcctggccactgcaaccagtctctttttagttcgtcttgaacatgcatttcagacttttccttgaacatgcatcaaaatgtttgccattgtttgttagaagaaccctggaaaaggtctggaagtaaaaaaccaacaaagggtggatacaattggacttttatagactggaatcagaatacttttaatatcacgaactagtgccttgtcattnnnnnnnnnnnnnnnnnnnnnnnnnnnnnnnnnnnnnnnnnnnnnnnnnnnnnnnnnnnnnnnnnnnnnnnnnnnnnnnnnnnnnnnnnnnnnnnnnnnnnnnnnnnnnnnnnnnnnnnnnnnnnnnnnnnnnnnnnnnnnnnnnnnnnnnnnnnnnnnnnnnnnnnnnnnnnnnnnnnnnnnnnnnnnnnnnnnnnnnnnnnnnnnnnnnnnnnnnnnnnnnnnnnnnnnnnnnnnnnnnnnnnnnnnnnnnnnnnnnnnnnnnnnnnnnnnnnnnnnnnnnnnnnnnnnnnnnnnnnnnnnnnnnnnnnnnnnnnnnnnnnnnnnnnnnnnnnnnnnnnnnnncacttatggtcattatgtgattcatgtcttgtgaaaatggttattatatactccctccgtcccataatgtaagacgttttttgacactacactagtgtcgaaaaatgtcccatattacaggacgggagggagtataatttaaccatgtaagttcacttgctatgttacatgtttttttctgaccaattgaatatttattttggttattatttctatggtggtgtcaggcaaattactgtaacatgataattttcagtattgttgaatgattctgttacttaaaaggctaaagcgaacttactgcttttgtgaatccttgtgcactcatgcagaattatggatacacacataaaaacaagtcactggaagagattttgcgagatgctaggaagaaagaaccagaactactaggttataatgaagaaccaatcaaagtcgaggctgacatatctgcagaaacaaataatctgaagataggtaaagaaagggatgcaaacatctctttccaaaatacagcaatttctattcgtgggactcttagaacctctagccaaagaacagcagggaataccatgttttccaaggatgatgtcagtattgaaaggaataatcagctcaaggttgcaaagcagaatgcctgtctgccgaagggaacaactcagaaaaatattagaaaggagtatcatggtaatgctaaatctaatacattttttatgcaccgtaatgctctccattagaaagttgaaaaaaaatatgcacactgtcgactttgacctcacatacctggtggcactgtgaacagcacttaaattttggattaattagccatttgttttgtcttttaaccatgatgtatatattcttatgaagatacgaaatgtctgtggtacttctcaagcaccaagtttgcagtatttgtggtttaaatttggtgttgaaacattctacatggaaagaagcaattacacatttcatctgactgtttattgtgcattcaacttgattgtgtcaaaacaacttcatctattgagtgggagataacaaatagacccagatatatcgagttaatgttttaaggcgattgagtttgctaaatttgcaggatatacaactatgttttattattcacacttcaaatttcgttctaattttaaaggaagcgccttaacgcttttaatcacctttgcaggtgatatggtaaataaaacagcaaagtctttcctttttgaagtatgtgccgtaagttattggataccccctgaatttgaattgtgcaaagaagaagggccaagccacctccgaaggtaagcttgcttgaaggagaacatacatcaagttgcctgcattacaaattacaatgaattatagtctccttgtacggttccttttcttacagagtttgtggtttcttcagtgtagaaaataaaaaatatgtttcttatccatcataatatatgtccatttctaagttccttatttttggtgtttatcctggtaaggagagtggcatgtcaattctaggttaaatagtgctctaaaaaggaggattaagcagaatctaagcacagacactattcttaacctcaagctttgcataaacggtagtttcgggtagcttaagctggcaaggaccgtcattattaagcagttgctttaacagtttgagagcagtgtacttttttatggaaaggtctcaagaatatttgtcaatatctaacttgtttaggaaaattgccagcaagtctggaaaggtgttatctactttgtagtggtattctggtatttgtcatacaagttcactgtggtgtactgcttcagagccaagcatttgctactagtcaaatactatgatttcagtgggtatgatataaaaaaaagcaagttcagactatagtgaacacataaatttaaaatcttaagacatgtttcactgtcattttatttggttacgtgataatgcttcttcgtgatatgcattatatccaattcaggcgtgaatataaaatgcaacgtaagtatatgaggtgataaatgtgttgctgtctagtcacatagtgtgttgtatttgttacaaaatgttgtggataccaattattttactatcaaggtgtgtacatgctccgctaacttcatgcgtgaaatgacacagattcacgtacaaggttacagttcagatcaggggaccctcggagacactcttggagtgctacagcgatgctcaactacagaagaaggccgcacaagagcatgccgcgcagggggctctgtggtatctcaggcaacatgggtacctacccaaagatgaagttcgtgtgtag

SEQ ID NO: 980 - DNA, 5861 bp, Triticum aestivum
  source 1..5861: mol_type = genomic DNA
atgaagaaagcaatagcaatatactaaacgatcaagtgctaggctaacggaatgggtcatgtcaatcacatcattctcctaatgatttgatcccattaatcaaatgacaacacatgtctatggttaggaaacataaccatctttgattaatgagctagtcaagtagaggcatactagtgatgttgtgtttgtctatttattcacacatgtatcatgtttccggttaatacaattctagcatgaataataaacatttatcatgatatgaggaaataaataataactttattattgcctctagggcatatttccttcaagaacaactagttagtgattttagactgtatatagattgatgtaagaaccgattcagtaaacattaagttgatatttgattgagttgaaaactgcaagaacccctcccagtttacccaagaaaagtccctgcccgaaagtataatgggggaataaagtgaaaaagtgaaatcaagcaaataggagaactaaccaacaggagaaaaacgatgaaattgacatacaagcccaatgaaaagaggcggcgatgcagggaagaacacagggtggaggaacaataattttggttaaaacaccaaaaaggtcaaggacaagagtgaaaagagaaaaatcagaaaccgcgaaagtgataaccaaaaaacgtgatgtgatcgcctctccttccaccatgtgtcgagcggggagcgtagcggagaatctcctcgacatgcgacgtcccgccacttgtcacgcttggaagccacgagcgataatacccaagggtaccatttaagtagttatttcggttccaaaaaaagtagttattttggtttttttactagcagtggcatgaattttttgctgggatgattatgcatgttttttttaggataggatgattatgcacgtgtttggtcaaggtgcaaacgcgcggtgattgggtggctctcctccgcttgcaacctaccctaaaaacatggttaatagtatagccagctgctggttataagccagtgccatgtcatttacagctcattttatagtcaacatgtacaatagtagataaaaaagtgtactactgttttattatgtggcccaccttttattctcacaaagtgcccaagagcacgtgcttgagctagctcttcacgaagagcccgcttaccttttctcacctcttctctttcctccaactaaatagaaatatactaatttattccttataacctgctaactcagctctattgtacttgctgtaagctgggcttctctgggcttgagctcgtttcgaactcgaccgtcgcaaaatttcacatcacaataaaaggcgaggtagactcggaaaattaggtcaaaaagtaggaagagaaacgcgatagcccctcgcctcgccgccgccgccgagcagcgcacctgcccttccgccggcgaatccgctcgtgccctagccggagactaggtattggcgcagatctgccggcagcgatgtcgggaaccgcggccccacggtacgcgccggacgaccctacggtgccgaagccgtggcgcgggctggtggacggcaccaccggctacctctactactggaatccggataccaacgtcacccagtacgagaagcccgtgccgccggaagctcagctcccgccgcccccgcctctcccgcctcctcctccgcgcgcccgcggccgggaccgtcgagaccgttcccgttctcgctcccgctcccgttctcgcacaccgcctcggcgtgaacaccgggaccgcgaccgcgaccgcgacaggcgccgtcacgacgagcacgactcgttcaagccgtcgtcgtcccatcaccatcttcctccggctgccaccatcatccctaccgccgcagctgatgatccatcagccgaagcataccgccgtcgccatgagatcacagtcatcgtaaggatctcgcagctatcctcgtgttacctcatagcatgtttgtgttacacatctcatagcatgttcgttactcagtatctattttttttgtttggtctgtgatgcagggggataacgtgccggctcccataactgagtttgactctggtgtcatcccgcttgatatactcaaggaggtatgcataagtttggtgatgaattatcacccaaggtctaacactaacccaaaagagtttgataagggtcagcatgttggatcacggggatgcgctcttctttatctttatctgtttgattgattgttctaaatcagggacgcttgcgagtcagttacttatctacatctctgtggcagatgcgatattcgctccaaggtggagctaatgtcgcaccctgcttcgtgcgccctcgtccagtctgtaatttcgacgggctgagggcggatgtcgttgatggagctgccaagggtgggtggacaccccaggcggcttgctccctgctaagggggctgcccatggtctaaaaggccatctacgtcggctgacgctgatttgtttctccgcgtacggttcctggtaaaggctcctcacatggatggcaggcctcttctgggggctatggagatctcacccaggctgaaggcctccaaatgcctgaccaatggaaggggcctgtggatgaacgatccatggctgagcgagcctgtctccagggattctgttagagcttttctacttcgccctgtttccacactttgtggatctgttctcttccgtacggccttaaattgacttcacacattgttgattctttgttgttttcactatatagagtaactagagtttcagtgggagctgtagcagatgtaggtgcatcacattaaccatattcttttggtgtccttattttgtttgcctttgccttccgttcccctttcttttttccagatacaacgcgccggattcccaagtccaacgcctatccaagcccagtcctggccaattgccttgctcaatcaagatgttgtagctattgccaagacaggatctggaaaaactctcgggtatttgcttcctggctttatgcatataaagcgtatgcagaacagcacaaggtctggcccaacagtgttagttttggcacctaccagagagctcgcaacacagattttggaagaagctgtgaaatttggcagatcatcaagaatttcttctacggtgagttttctttgccttgcttcttcctggattatatgttcatcatctgatcctttgttcttggtctcttcttagtgcctttatggcggtgctcctaaagggccccagttaagagatttagaaagaggggttgatgttgttgttgcaacacctggaaggttgaatgacattctagaaatgcggaaaataagcctaaagcaggtctcgtaccttgttctagacgaggctgaccgcatgctagatatggggtttgaaccacaaatacgaaaaatagtaagagacataccttctggtcggcaaactcttatgtacactgctacttggcccaaggaagtccgaagaattgcagatgagcttcttgttcaccctgttcaggtgaccattggaagtgtggatgagcttgttgctaataaagctattactcaggtacgcgacttgctttgtacactgcactgatgatacttggaaatatcttctttttttttcctttcaccaagtacatatcttttaattttctgttctgttctgtcttctgctcctgtgttctgctcctgttgctctgccagcatgtggaggtggtcactccctcagaaaagctttggcgtctggagcaaatattgcgatcccatgattcaggttccaagatactaatattctgtaccaccaagagaatgtgcgaccaactatcaaggacactcaataggcaatttggagcggctgccattcatggtgacaagtctcaaaatgaaagagagaaggtcctgagtcaatttagatctggacgatctcctattttggtggctacagatgttgcggcacgaggtttagacatcaaagatatcaggttagtcaataatattattctaatgattttattgctatattggtgctgcttcatgtatttatatgacatactccctccgtccgtcccaaaataagtgtctcaactttgtactaagcttgagacactattttgggacagtgggagtatttgaatgtctaaatggggctaaagaatggttcccttgcgacccatggtagcagaagtgcatgacaaggatacctaaaatttcagtagatagcatgtgtttttggttgtgtccaaaacctgtgctaccaatgtttggtcgttaccaaaacttaggtccttaatgggattgcaatttttccggcatgttcatgcccctttgcccattctagttcatatgcgccgccattttttctggctcggtaggcctttgcttaaaccaatcaggccctaaacaaggaagtgcagtcaatatgccctcagaagctattcattatcatggcatgtccagctgtatatttgctgaaattattctggatttaagttcatataactagtgcaaatgtacacacagaatcttgaagaaagctgttgtttaaatcagtattgttctgatctttaccaccagtgcttcaaatctcagaaatgatctcacaatatcctcttgctttcttgacatagggttgtgatcaactatgacttccccactggtgttgaggactatgttcacaggattggcaggacaggaagggctggtgccactggtttggcctatacgtttttgtgtgatcaggattcaaaatatgccgccgacctaattaaaatcctggaaggggcagaccaagatgttcctcctgaactgttagacatggtctctcggggtgggcgtggtaggaaacgtaacaaatgggcaacccgctctgagaggggtggtggttcacgccctgaactggattcaaggtatggtggcaggttagagggtagtcgcggtggacgtggaaaggatgattatggtggccgtagcaggttcgttctgtcccttccattttgttttctgcaattgctgaagaaaacagagtttgggtcttgttagtgttaaccgaagtaattcgagattataaattctttcgtcgttgttgttcggtagtttgtgttcctgagccaaggaccatggtctttacaatgttgctgatgtttgcaggaatgatcacggcgggtctcgcaggtctgctagaggtcgcagcagaagccttagcaggagtgacagtgataggcgcagcccaagccccaagagacggcgccatgatgtgcagtctagccgtagcaggactagaagtcggagtcggagcaggagcaggagcaggagcaggagcagaaacaagagcaggaataggagccggagcaggagttacactaggaatcgtcgtgctagccgcagcaggagtcgtagccctggcgctagacgcaggcctgaaagaagagctggctctgggtctacacgtcctgactctgcccacccagtggagaagaaaagctcacccaatgctcacccttcaaatgaccacaggagccgcagtgtcgacccttcaaatgactatcaggcggaggatgggaagatgggaaaggttgatctggatcggtcgcccagtccgcaggagcaggatgacaagtctgctccatatagttctgtgtataatggcgaaggaggcagggggtcaatgagccctaatggcgagccagtggtggatgctaaacctgtggaagtctctgtgagcagcaagaagagggaggatgaagaggaaggtatgattgatgaagagggagaggagggtatgatagccgatgatgaccctcgcgcaagtgcagctgtgcaaaacggtggtgataagtga

SEQ ID NO: 981 - protein, 954 aa, Triticum aestivum
GRGSEDRTHTPTPTPTGEDRRDGTRIAARMDPHDGEPAADELPPPPPLPPNVVPIIAEDAAAAAAGESEPPPPPPPPSKPAKPRKHIMARPPNGLGKKGQPIQLLANHYKVSVKPSEEFFNHYYVNLKYEDDTPVDSKGIGRKVLDKLQHTYHSELANKDFAYDGEKSLFTIGALPQINNEFIVVLEDIGSGKTAAGSPGGNNGSPGGGDQKRVRRPYQAKTFKVELNFAATIPMAAIGHAIRGQESEHSLEALRVLDIILRQHSAKQGCLLVRQSFFHNNPSNFVDLGGGVMGCRGFHSSFRGAQSGLSLNIDVSTTMIVKPGPVIDFLLANQKVDHPDKIDWQKAKRALKNLRIKTTPANSEFKIVGLSERNCNEQMFPLRRRNGDSTETVEITVYDYFVKNRGIELRYSGNLPCINAGRPKRPTYFPVELCTLVPLQRYTKALSTMQRTSLVEKSRQKPHERMSTLNDALKRSNYDADPMLKACGISIAQNFTQIEGRVLPAPKLKAGNGEEFFTRNGRWNIARKKLIRTSSVKRWSVVNFSARCDLRGLVQDLKRVATGMGLEYEDPHTVIEESPSLRRAPVARRVEEMFAQIKAKLPGAPLFLLCLLPERKNCEVYGPWKKKCLADFGIVTQCLAPQRVNDQYLSNLLLKINAKLGGLNTLLQIEAARAIPIVGKVPTIILGMDVSHGQPGQSDRPSIAAVVSSREWPLISKYRATVHTQSPKQEMMASLFKPRGTEDDGLIRESLIDFYTSSGKRKPDQVIIFRDGVSESQFTQVINIELEQIIEACKCLDDKWEPKFTVIVAQKNHHTRFFQANSPENVPPGTVVDKQVCHPKNFDFYMCAHAGMIGTSRPTHYHVLHDEIGFSGDELQEFVHSLSYVYQRSTTAISVAAPIAYAHLAAAQVGTFMKFDDMSDTSSSQGGGHTSAGSAPVPELPRLHEKVRSSMFFC

SEQ ID NO: 982 - protein, 915 aa, Triticum urartu
MPSQPPTQPLLTRTERRRPFSASGLLARGPSGTLAWPCQKITLLCCAPLSIGSSIWDPDFFPHLIDSILQGFFRFNWIFFWSQLNEVSINPESKSRAVNREVLSELIKLHGKTSLGGKLPAYDGRKSLYTAGSLPFESEEFSVTLVDPEKKDKEKAEREYKITIRIAGRTDLYHLQQFLKGRQRDMPQETIQVLDVVLRESPSWNYVTVSRSFFSTTFGHRGDIGEGLECWRGYYQSLRPTQMGLSLNIDISATSFFKPVTVVQFVLEFLNLRDASRPLTDRDRVKIKKALRGVRVETNHQEDQIRRYKITGITPVPMSQLIFPVDERGTRMSVVQYFMQRYKYNLQYTSWPCLQSGSDARPVYLPMEACKIVEGQRYSKKLNDKQVTNILRATCQRPQQREQSIREMVLHNKYAEDKFAQEFGINVCSDLVSVPARVLPPPMLRYHDSGKEKTCAPSVGQWNMINKKMINGGIIDNWACVSFSRMRPEEVYRFCCDLIQMCNMTGMSVNPRPLVDNRSASPNHIENALRDVYRRTTEMLGKQGSEKQLQLLIVILPEVSGSYGKIKKVCETDLGIVSQCCLPRHASRPNKQYLENVALKINVKVGGRNTVLERAFVRNGIPFVSEVPTIIFGADVTHPPPGEDSASSIAAVVASMDWPEITKYRGLVSAQPHRQEIIEDLFSVTKDPQRGNVNGGMIRELLIAFRRKTGLRPERILFYRDGVSEGQFSHVLLHEMDAIRKACASLEEGYMPPVTFVVVQKRHHTRLFPEVHGRRDMTDKSGNILPGTVVDLMICHPTEFDFYLCSHAGIQGTSRPTHYHVLYDENHFTADALQSLTNNLCYTYARCTRAVSVVPPAYYAHLAAFRARYYVEGDSSDGGSTPGSSGQAAIAREGPVEVRQLPKIKDNVKDVMFYC

SEQ ID NO: 983 - protein, 1120 aa, Triticum urartu
MVRKKRTGPGSPGESSGEASGASGQGSSQRAERAPQQHGGGRGLAPQQHGRGGGQQQGRGGHYQGHGGSASHYPGGGPPEYQQRDYQGRGHPGGGPPEYQHRDYQGRGHPGGGPPEYQPRDYQGRGHPGGGPTEYQPRDYQGRGGPCPRGGVPQPYYGGHRGGSAGRNVPPGPSRTVPELHQAPHVQYQAPVVSPSASGAGSSSQPVSEVSSGQVQQQFQKLAIVDQSSTSQSSQLAPASSKSVRFPLRPGKGTHGDRCVVKANHFFAELPDKDLHQYDVSITPEITSRGVNRAVMAELVRLYRHSQLDGRLPAYDGRKSLYTAGPLPFPSKTFEITLHDEEESLVGGQVAPRHERQFRVVIKFAARADLHHLAMFLAGRQPDAPQEALQVLDIVLRELPTARYSPVGRSFYSPNLGRRQKLGDGLESWRGFYQSIRPTQMGLSLNIDMSSTAFIEPLPVIDFVAQLLSRDISVRPLSDSDRVKIKKALRGVKVEVTHRGNMRRKYRISGLTSQATRELSFPVDDRGTVKTVVQYFLETYGFNIQHTTLPCLQVGNQQRPNYLPMEVCKIVEGQRYSKRLNEKQITALLKVTCQRPQEREKDILQTVHHNAYYEDPYAQEFGIKIDERLASVEARVLPPPRLKYHDSGREKDVLPRIGQWNMMNKKMVNGGRVSHWACINFSRNVQDSAARGFCHELAIMCQISGMDFAPEPVLPPLTARPEHVERALKARYQDAMNIIRPQGRELDLLIVILPDNNGSLYGDLKRICETDLGLVSQCCLTKHVFKMSKQYLANVALKINVKVGGRNTVLVDALTRRIPLVSDRPTIIFGADVTHPHPGEDSSPSIAAVVASQDWPEVTKYAGLVSAQAHRQELIQDLFKVWQDPQRGTVTGGMIKELLISFKRATGQKPQRIIFYSIFRDGVSEGQFYQVLLYELDAIRKACASLEPNYQPPVTFVVVQKRHHTRLFANNHNDQRTVDRSGNILPGTVVDSKICHPTEFDFYLCSHAGIQGTSRPAHYHVLWDENKFTADELQTLTNNLCYTYARCTRSVSIVPPAYYAHLAAFRARFYMEPDTSDSGSMASGARGPPQGGRNTRPFGNVAVRPLPALKENVKRVMFYC

SEQ ID NO: 984 - protein, 868 aa, Triticum aestivum
MGKCGDRCVVKANHFFAELPDKDLHQYDVTITPEVTSRGVNRAVIAELVKLYRQSHMNGRLPAYDGRKSLYTAGPLPFTSRTFEIALQDEDEGLVGGQATPRRERQFRVVIKYAARADLHHLAMFLAGRQPDAPQEALQVLDIVLRELPTARYSPVSRSFYSPNLGRRQRLGDGLESWRGFYQSIRPTQMGLSLNIDMSSTAFIEPLPVIEFVAQLLCRDISVRPPTDSDRVKIKKALRGVKVEVTHRGNMRRKYRISGLTSQATRELSFPVDDRGTVKTVVQYFLETYGFNIQHTTLPCLQVGNQQRPNYLPVEVCKIVEGQRYSKRLNEKQITALLKVTCQRPQEREKDILQTVHHNAYYEDPYAQEFGIKIDEQLASAEARVLPPPRLKYHDSGREKDVLPRVGQWNMMNKKMVNGGRVGHWACINFSRNVQDNAAKVFCHELAIMCQISGMNFAPEPVLPVLSARPEHVERALKARYHDAMNASKPPGKELDLLIVILPDNNGSLYGDLKGICETELGLVSQCCLTKHVFKMSKQYLANVALKINVRVGGRNTVLVDALARRIRLVTDRPTIIFGADVTHPHPGEDSSPSIAAVVASQDWPEITKYAGLVSAQAHRQELIQDLFKVWQDPQRGTVTGGMIKELLISFKRATGQKPQRIIFYRDGVSEGQFYQVLLFELDAIRKACASLEPNYQPPVTFVVVQKRHHTRLFANNHNDQRTVDRSGNILPGTVVDSKICHPTEFDFYLCSHAGIQGTSRPAHYHVLWDENKFTADELQTLTNNLCYTYARCTRSVSIVPPAYYAHLAAFRARFYMEPDTSDSGSVASGARGGPPQGGPRSSTRFGNVAVRPLPALKENVKRVMFYC

SEQ ID NO: 985 - protein, 107 aa, Triticum aestivum
MVCGGPPCQGISGLNRFRNYNEPLEDDRNKQLVVFMDVVNYLRPKYVLMENVVDILKFADGFLGRYALSRLVSMRYQARLGLMVAGCYGLPQFRMRAFLGGALPSRV

SEQ ID NO: 986 - protein, 758 aa, Triticum aestivum
MSNQPDTLLHGYRPVLDRPEDEEDMKARVHYRSAMVDGVVYALGDDVYVMAGENEADYIGRITEFFEGVDKTSYFTCRWYFRPEDTVISRAKFVNDHTHDPKRVFLSEEKNDNLLDCIISKVKIIHVDPNMDPAAKAKLVARTDLYYDMSYTVAYSTFANIPSDTTENSGISTDADSENGTPVKTASLLDLYSGCGGMSTGLCLGSALAGLKLETVRNEKAEDFLALLKEWAILCDKYVHSNDSDAADPVEEEEDDEPLGKDEFVVEKLLEICYGGTGRKNGIYFKVQWKGYGPEEDTWEPIENLSDCPLKIKEFVQEGYRRNILPQPGQVDVICGGPPCQGISGFNRFRNRDNPLEDEKNQQMVTYMDIVSYLQPKFVLMENVVDILKFADGYLGRYALSRLVSLNYQARLGMMVAGCYGLPQFRMRVFLWGALPTMVLPKYPLPTHDVVVRGGAPNAFSQSIVAYDETQRPTLKKALLLGDAISDLPKASAFFPCFISSSSTFVLTSIIMQVDNCQPHEVIEYGGQPKTDFQRYIRLSRKDMLDYSFGDATCPEEGKLLDHQPLRLNQDDYDRVQQIPIKKGANFRDLPGVKVGANNIVEWDPDVERVYLKSGKPLVPDYAMSFIKGRSPKPFGRLWWDETVPTVVTRAEPHNQIILHPNQGRVLTVRENARLQGFPDYYRMYGPMKEKYIQVGNAVAVPVARALGYSLGRAYQGEVDAGYDALFVLPDSFTNIGQTGARARASSVGTPAGEVVEQ

SEQ ID NO: 987 - protein, 870 aa, Triticum aestivum
MDRSPAPLSPPGFAVPLAVKKRQQAAPGYSSSSSPWGVPPAPPLTNNNNPNPPNGLRAGDTSIFSTSLPVLPHEKLNFPDSAHGTPSMDDASAKLKDFDDDPQGNDYPFDFDLRQIDDLLPDEDELFAGITNEMEPSSQANPVEELEEFDVFGSGGGMELDSDPLDSITAGLGNASISDGIRANGVNNNFGLSNSPGAVAGEHPLGEHPSRTLFVRNINSNVEDSELRSLFEQFGDIRTLYTATKHRGFVMISYFDIRAARGAMRSLQNKPLRRRKLDIHFSIPKENPSDKDLNQGTLVIFNLDPSVSNEEVRQIFGTYGEVKEIRETPNKKHHKFIEFYDVRAAEAALRSLNKSEIAGKRIKLEPSRPGGTRRSLVQHLGHELEDETRGYRHSPHVGSPMANSPPGAWAQYGSPTDNNLLHAFSNSPTGNGMSPIGMSPSMMSNALKIAPIGKDNNWSKYDQVFSNSNQSLGAAFQYSQSYQDRKSEHMSSSPGTLTGPEFLWGSPKPYPEHSQSSSMWRPPPVGHAMSSSSRPQGQGFLYGSRQASLFGSLDQNRHHVGSAPSGAPFESHFGFLPESPETSFMNQVRFANMGNIGGANRNGGSLMLNMASRASLNPVSALSGSLTDNNSTNFRPIPSPRLGQPPFFGNTTYQGPGYYGLDSSSIERGRNRRVDSSAFQADSKKHYQLDLDKIRKGEDTRTTLMIKNIPNKYTSKMLLAAIDELHKGTYDFFYLPIDFKNKCNVGYAFINMISPVHIVSFYQAFNGKKWEKFNSEKVASLAYGRIQGRNALISHFQNSSLMNEDKRCRPILFHSNGPETGNQEPFPNGICIHMPLDGGAGSSKEPLGFEEDDNPSEIKISGEKSMAGSL

SEQ ID NO: 988 - protein, 1625 aa, Triticum urartu
MATVPSVTAPAPIWAISAVFPPVYHTHLFGCASWGLSLLGVRRLFSEIRWSTCILSGSVLGGIEIHRKSSVALICLDCLQLVIFVLEYPRDISNMVKSPRSPVTTGTKRCRAKPQKKGEEFTAQGKLVDGPQDATNGVEKGAGSATHKRPRRAAACSDFKEKSVRLSEKTSVVKIKKNRMEEEEIDAINLTKLGPEDSPPCRKLIDFILHDADGNLQPFEMSEIDDFFITALIMPMDDDLEKERERGVRCEGFGRIEDWAISGYDEGTAVVWLSTELADYECVKPASNYKSYYNHFYEKAQVCVEVYRKLMRSVGGNPNMSLEELLASVVRSVNAIQGYTGTMSKEFMIATGEFVYNQLIGLDQTAGNDDEKLVTLPVLLALRDECKSRAEFTKMPLSISNGSLKIKDIECKEVAEDDDEKLARLLHEEEEWKMMKKQRGNRGVPSQKNVYIKISEAEIANDYPLPAYYKPSSQEMDEYIFDSEDGMFSGDVPVRILNNWALYNADSRLISLELIPMKSGAENDIVVFGSGFMREDDGSCCSTAESAKLSSSSSKADNQDVGVPIYLSPIKEWVIEFGGSMVCITIRTDVAWYKLRQPIKQYAPWCEPVLKTARLAVSIITLLKEQSRASKLSFADVIKKVAEFDKENPAFISSNIVLVERYIVVHGQIILQQFADFPDETIRRSAFATGLLMKMEQRRHTKLFMKKKAQVTRGENLNPIATMGTSSKRKAMRATTTRLINRIWSDYYAHHFPEDLKEGDGNEAKEVDDEQEENEDDDAEEEVQIEEDKVAKTPPSTRSRKLVSQTSKEMRWKGDPAGKTTSGEALYKCAYARELRIDVGGAVTLEDDSGEIVICFVEYMFQKSDGAKMVHGRILQKGSETVLGNAANERDIFLTNDCLEFELKDIKELVSVNLQSMPWGHKYRKENSEAEKIEWAKVEERKKKGLPMEYLCRSLYWPEKGAFFSLPRDKLGLGNGVCGSCEHREPDCDELRILTKTSFIYRKVTYSVHDFLYIRPEFFSQEEDRGTYKAGRNIGLKPYAVCHLLDVCGPAGSKKVDPASTKVSVRRFYRPDDISTAKAYTSDIREVYYSEDIINVPVDMVEGKCEVRKKIDISNSDLPVMIEHVFFCEHFYDCATGALKQLPSNVKLMSVARKATGALKKNKGKQICENNEVDSGKWMEVPKESRIATLDIFAGCGGLSEGLQQAGVSFTKWAIEYEEPAGEAFRQNHPEAAVFVDNCNVILKAIMDKCGDSDDCVSTSEAAEQAAKLAEENIKNLPVPGEVEFINGGPPCQGFSGMNRFNQSPWSKVQCEMILAFLSFAEYFRPRFFLLENVRNFVSFNKGQTFRLAVASLLEMGYQVRFGILEAGTFGVAQSRKRAFIWAAAPGEILPDWPEPMHVFASPELKITLPDGKYYAAAKSTAGGAPFRAITVRDTIGDLPKVENGASKLVLEYGGEPTSWFQKKIRGSTIALNDHISKEMNELNLIRCKHIPKRPGCDWHDLPDEKVKLSSGQMVDLIPWCLPNTAKRHNQWKGLYGRLDWEGNFPTSVTDPQPMGKVGMCFHPDQDRIITVRECARSQGFPDSYQFSGTIQSKHRQIGNAVPPPLAFALGRKLKEAVDGKHQQA

SEQ ID NO: 989 - protein, 683 aa, Triticum aestivum
MIDQYKHQQLQIGLVSPQQIKAWANKNLPNGEVVGEVTRPSTFHYKTDKPEKDGLFCERIFGPIKSGICACGNSRASGAENEDERFCQKCGVEFVDSRIRRYQMGYIKLACPVTHVWYLKGLPSYIANLLDKPLKKLEGLVYGDFSFARPSTKKPTFLRLRGLFEEEIASCNHSISPFFSTPGFATFRNREIATGAGAIREQLADLDLRIIIENSLVEWKELEDEGYSGDEWEDRKRRIRKVFLIRRMQLAKHFIQTNVEPEWMVLCLLPVLPPELRPIVYRSGDKVVTSDINELYKRVIRRNNNLAYLLKRSELAPADLVMCQEKLVQEAVDTLLDSGSRGQPTRDGHNKVYKSLSDVIEGKEGRFRETLLGKRVDYSGRSVIVVGPSLSLHQCGLPLEIAIKLFQLFVIRDLITKRATSNVRIAKRKIWEKEPIVWEILQEVMRGHPVLLNRAPTLHRLGIQAFQPTLVEGRTISLHPLVCKGFNADFDGDQMAVHLPLSLEAQAEARLLMFSHMNLLSPAIGDPICVPTQDMLIGLYVLTIGKRRGICANRYNSCRNYPNLKVNYNNNNNSKYRKDKEPHFSSSYDALGAYRQKLISLDSPLWLRWNLDQRVIGSREVPIEVQYESLGTYHEIYAHYLIMGNRKKEIRSIYIRTTLGHISFYREIEEAIQGFSQAYSYTT

SEQ ID NO: 990 - protein, 1402 aa, Triticum urartu
MEQACRGGERRFINAHFRVLTCDTDTRAKNTEFKRHNVDDLMMEEPNAEMGMPTGELKGITFYLMTNTEMEKSSSVSIVEPSDVSSAKLGLPNGAPQCETCGAQSVRECDGHSGVIKLPATVFNPHLFEEVVQLLNQICPGCHTPKQNRDSKRSDGATSQATCKYCSKDGTKQYPDVIFKTLTSPRMTLSKAKLQRDPSVMDKISLTAEVADRVTDSAEVLPLDYWDFVPHHHPPQSNMTKILLSPYQASHILKQLDPELFSRFASRPELIFLSCLPVTPNFHRVAELPYGFSDGPRLAYLHSKKTDKESSTDTHGMKWLKDAILSKRSDNAFRGTMVGDPKIRLHEIGIPVDLASNLLVSEHVNSYNFDSINSKCNCYLLANEKLVIKRSGKTIIVRKPNQLVIGDTVHRLLQDGDLILINRPPSIHQHSVIGLSAKLLPVQSVLSINPLCCAPLAGDFDGDCLHGYVPQSIQSRVELEELVSLSHQLLNAQDGRSLVSLTHDSLAAAYLLTSSEVLLKKTEVQQFQMLLCHPLSPTPGPAIMKSIHSHGPLWTGKQLFSMLLPSDMSFSIEPKNSISGLFSVMFKQYGDKALELLSSAQDVLCEFLTMRGLSVSLSDIYLFPDHDSRRKLADGVNLALDDAEEAFRIKQILLSPDSISILKCYDDCADLSQSYEQSNFIQSNLPIIKSSIMAFKSVFSDLQKMVQQHTAKNNSMMMMTNAGSKGSMLKFVQQTACVGLQLPASRFPFRIPSELSCASWNRHKSEGTGECLGGQNLYAVIRNSFAGGLNPLECLLHSISGRANFFSENADVPGTLTRKLMYHLRDLYVAYDGTVRSSYGQQIMQFTYDTAEDMCSDRNVEGELGAPVGSWAACSISEAAYGALDHPVNSLEESPLMNLQDVLKCQKGGTSMDHVGLLFLSKNLKKYRYGLEYASLEVKDHLEPVNFSDLVDTVMILYGGCGIESTKGSAWITHFHLSQEMMTKKRLGLTLVVEELTEQYNAKRDKLNFPKVYISKGVNTAGKMVRRLFGRGIRLGIARMSKCSADNECGNRQTCCITVVTQDDSNSMSQLDTIKKRVIPNLLALLVKGFLEFKKVEIQCQEDSELVVKVVMSEEHCKSVKFWATLQKSCIAIMELIDWERSRPGSVYDIFCSYGIDSAWKYFVESLRSKTDDIGRNIRREHLLVVANCLSRPAHTFINAAKQSSVDNLCGTVDAMAWGKEPSTGTSGPFKIIYSGKAHAPIPNENIYDFLNSPEVRQAPGEAFLNGSTISVEQDFLVAAVGIWDSIIDMRTCLQNMLREYQLNECVGELDKSRVIEALRFHPRGREKIGAGIEDIKIGHHPSHPGTRCFIMVKAYVRIQNDDGGTLDAIPLFGASYLETWLGGSKLRSYGARCCYGPFSRV

SEQ ID NO: 991 - protein, 1402 aa, Triticum urartu; identical to SEQ ID NO: 990

SEQ ID NO: 992 - protein, 1076 aa, Triticum aestivum
MLRNGNEGMSTIPGFSQIQFEGFCRFINQALAEELDKFPTIKDPDHEIAFQLFAKGYQLLEPSIKERDAVYESLTYSSELYVSARLIFGFDVQKQTISIGNIPIMNSLGTFIINGIYRIVINQILLSPGIYYRSELDHKGISIYTGTIISDWGGRSELAIDKKERIWARVSRKQKISILVLSSAMGSNLREILDNVSYPEIFLSFPNAKEKKRIESKEKAILEFYQQFACVGGDLVFSESLCEELQKKFFQQKCELGRIGRRNMNRRLNLDIPQNNTFLLPRDVLAATDHLIGMKFGTGILDDDDMNHLKNKRIRSVADLLQDQFGLALGRLQHAVQKTIRRVFIRQSKPTPQTLVTPTSTSILLITTYETFFGTYPLSQVFDQTNPLTQTVHGRKVSCLGPGGLTGRTASFRSRDIHPSHYGRICPIDTSEGINVGLTGSLAIHARIDHLWGSIESPFYEISAEKAKEKKERQVVYLSPNRDEYYMIAAGNSLSLNQGIQEEQVVPARYRQEFLTIAWEQIHVRSIFPFQYFSIGGSLIPFIEHNDANRALMSSNMQRQAVPLSRSEKCIVGTGLERQTALDSRVSIIAEREGKIISTDSHKILLSSSGKTISIPLVNHRRSNKNTCMHQKPRVPRGKSIKKGQILAEGAATVGGELALGKNVLVAYMPWEGYNFEDAVLISERLVYEDIYTSFHIRKYEIQTDTTSQGSAEKITKEIPHLEEHLLRNLDRNGVVRLGSWVETGDILVGKLTPQIASESSYIAEAGLLRAIFGLEVSTSKETSLKLPIGGRGRVIDVKWIQRDPLDIMVRVYILQKREIKVGDKVAGRHGNKGIISKILPRQDMPYLQDGTPVDMVFNPLGVPSRMNVGQIFESSLGLAGDLLKKHYRIAPFDERYEQEASRKLVFSELYEASKETKNPWVFEPEYPGKSRIFDGRTGDPFEQPVLIGKSYILKLIHQVDEKIHGRSTGPYSLVTQQPVRGRAKQGGQRVGEMEVWALEGFGVAHILQEILTYKSDHLIARQEILNATIWGKRIPNHEDPPESFRVLVRELRSLALELNHFLVSEKNFQVNREEV

SEQ ID NO: 993 - protein, 1120 aa, Triticum urartu
MEMALCHVSPIQLGAPAVNLPPMGSSVERGLDSEIILNKGQIRLNFSKKAGRWAAQALLGAAFVCLFRHANAVPWQVRSDYQAQTRVFFFFVVPFDEVMSLSEEGGGTTDKMGKQDNDVSRAVVEDDTALLLAAVDSIKKAALGRLRNGSDAARILDQDMSNRLLHLACRHDAAECARLLLDGEYGITPASVDARDPLTRTPLHVAAEGHSKRCIQLLLSRNARTDVRLLDGTRLVALEVALMSRRVQVDWSQDNSVEDLLAYLQQKDLNAVRLLAEKTREVGEVAYRYAMEGRVAALAMLLLVTEERISAMVSVVIDGVRTKRSIYNSVVDEVLSIGEASAREGNEMRRKALLCEIQLLNQFGATVWRDRKVDRRSLPPLLRAAKAGDMNVTKMLLMGDVDVNETDPEGNTALHWCLSSSSSTQEPRIVWLLQKNGARVFQGNKLGLTPVHSAAAKGNYKALQSLLLHAQDCVDIPSKTKETPLFLAVKNGSLSCVRLLLRYGANPKAQNLRKQRPIDVATSQDMRFLLNSANVVPMNHGSMEKNHAMKKERHKELLDDDFDDCDNDDYYESYVVPKASVGHRDFRVKSKGHSTPKEGPKLSRHNDHWEKHDYTRKIFVGGLPLSVDDAYLSKFFSTEFGPVEEAIVITLKIDERIQSRGFGFVKFKREKDMISAKEAHHVYVLGKRVEIKDAVARPSLPELERATSFRHHVRESPRVTHSELEDEQAEQYNFGKRRPMPEKHLPSWFFIFRRWLPGFLMEATERYGEKYPLCSVKTDFRSCCRMELDHSALGYPKLSDFMRSLPGICRMRVVPVGNGPATHMVLLPPLSRPKYVPLLEPYSFDHDELPESVSDHHSPRSPLTANITENAPYSTDSPQGDACSETNVQSQHDDECSRSNGESLPDGDSTSNCSLLDEVTVSTPKSDLIESPARKPDLIVSGALPGKAEQGPLRRPDLVESAPTKKLDLIESSPPPSPPSKADLVQPGPAGKLHLVESSPPRKAELVEPGPARKIDLNQPRPTTRFVDRPVERPAITPSSCENEMRFSFFHSQWDKYLTPHAKSDYCIICRSCEAAMELVPCLHKICVACMMRCNVRACMTCGTAGVMECVSDQKCQLMV

SEQ ID NO: 994 - protein, 1089 aa, Triticum urartu
MATAVSAPVFTATVRVSNIPPSAVAKELLAFFDSAVAAAGEAYACEIAAARRGCVRVEVIPGKRRIDLYLNHDSQRYRLEVYFEDIRNCLQCSFDGAGVILLQDLSEGVTPLKIRLFLSVQIDHAAVVNTSMITVLVLNVQRLQQLMYAPRICTTISGPAVYSRFSDDRFHACKEDAKFTWVRALDFTRNHSFGKCSTLALVLDEGAPVSFILNSLPMSGELGELVISSMEFFGPSSKVVPLVDCPSGCSVSYEVLFRLNSLVHMGKIVSKDVNADLFKALEEIPVHISRRIFEKMNKLDFTCYEPLQFIQQEAHSRKRSHDGLLSSKTEGEGKLMMCYRIHITPSKIYCLGPEEEVSNYVVKHHKQYASDFARVTFVDEDWSKLFPDAISARTGRGFFSHPLKTGLYHRILSILKEGFSIGPKKYEFLAFSASQLRGSSVWMFASNDSLKAEDISRWMGNFEDIRSVSKCAARMGQLFSSSRQTLEILPRDVEEIPDIEVITDGSKYIFSDGIGKISERLAKEMACRIGLDYTNPPSAFQIRYGGYKGVVAVDPDSFRNLSLRPSMKKFESKSRMFNITSTSKSQPCYMNREVISLLSTLGIRDEIFESMQQNDMRELDEMLTNREAALSVLGKIGSAETKTASKILLQGYEPSLEPYLLMILKAHQDNRLTDIRTRCKIHVPKGRVLIGCLDETGELEYGQVYIRITKNSKEQKDNCQPYFAEDNGKEKTAVVVGKVAVSKNPCLHPGDIRVLEAVYDHGLYAKNLVDCVVFPQRGERPHPNECSGGDLDGDLYFITWDEKLIPEKVDSPMDYTAARPRIMDHVVTLEEIQKYFVDYMINDSLGAISTAHLVHADRHPMKARSPECLQLAALHSMAVDFAKTGAPAEMPRSLRAKEYPDFMERWDKPTYISNGALGKLYRAAASRMQSAPAPSSSAQSSPAFDPDLEVPGLEEFLASAEEFYDLYAEKLSTLMSYYGAEHEDEILTGNIRNRLLYLKKDNKRYFEMKDRIIDSVEGLHKEVQGWFRSRPKAEASRWASAWYRVTYHPEHRRPGKKQFWSFPWIVCDELLKIKESSMRRRQQVDDAAA

SEQ ID NO: 995 - protein, 107 aa, Triticum aestivum
PHPNECSGSDLDGDIYFVSWDPDLIPTRMVAPMDYTPAPTETLDHDVMIEEVHEYFTNYIVNESLGIIANAHVVFADREILKAESTPCIKLAELFSIAVDFPKTGVP

SEQ ID NO: 996 - protein, 648 aa, Triticum aestivum
MESSRGILIPGTPPLPYAYEPLPSSSADANGQEDRRITGGVRWRAWAAVLAVGALVVAAAVFGASRVDRDAVASSVPATAEHGVLEKASGPYSASGGFPWSNAMLQWQRTGYHFQPEKNYQNDPNGPVYYKGWYHFFYQHNPGGTGWGNISWGHAVSRDMVHWRHLPLAMVPEHWYDIEGVLTGSITVLPDSRVILLYTGNTETFAQVTCLAEAADPSDPLLREWVKHPANPVVYPPPGIGMKDYRDPTTAWFDNSDNTWRIIIGSKNDTDHSGIVFTYKTKDFVSYEMIPGYLYRGPAGTGMYECIDLYAVGGGRKASDMYNSTAKDVLYVLKESSDDDRRDYYALGRFDAAANTWTPIDTEQELGVALRYDYGRYDASKSFYDPVKQRRIVWGYVVETDSWSADAAKGWANLQSIPRTVELDEKTRTNLIQWPVEELDTLRINTTDFSGITVGAGSVVSLPLHQTSQLDIEASFRINASAIEALNEVDVGYNCTLTSGAATRGALGPFGILVLANVALTERTAVYFYVSKGLDGGLRTHFCHDELRSTHATDVAKEVVGSTVPVLDGEDFSVRVLVDHSIVQSFVMGGRMTATSRAYPTEAIYAAAGVYLFNNATGASITAEKLVVHDMDSSYNRIFTDEDLLVLD

SEQ ID NO: 997 - protein, 304 aa, Triticum aestivum
MGNQELLEYFSDYAATKARHAYGPGGHRGMSVLIFESSAVGYMEAERLHKHFIDQRTDRDTWQNRRVPFLPGGKRQLYGFLARKEDMETFNRHCQGKSRLKYEMRSHNEMVVAQMKQMSEDNQQLNYLKNKVVKTEQRSKVVEETLGVITQKLRETMEENIFVRSKAKEKHSEYEEEMKSQEKFFHDQIENIHKATEDKESEFERLLQEERAKARQCDVDSGTTENRRLRKEQVQRFIECQVKDVQEFEAERDEMIKAHEEKKVQLKKEYMAKEVELEKEFDAALTGLMEKHRPGTFQASSSSP

SEQ ID NO: 998 - protein, 745 aa, Triticum aestivum
MDRTSNFMPTPDQDVLDIQPLRTLAPMFPAPLGVNTFNVPNTTPPLIFVTSAGQFPGGVGAPGHPAFRSFAAAFGAQDAYGGQPASSGGQHDGGGHPASSRRQDGGGGQATTFADKYAANGGQTAANGATNLGASADSPIDVIPISAYRPTPPPVIPLDDDDDDNEHFTGNQTSASGRKIKRPSHLSGYKMSGGLGSDDNNGVKTKRNKTSHRKAGADNEFTSVPLSSSNPREAVEEVLMNFEALRRRHLQLDAAQESTKRPDLKIGAVMMANNLRANIRKRIGVVPGVEIGDIFYFRMELCIIGLHAPTMAGIDYMTHTFGDKDDDSVAVCIVAAGVYENEDDATDTLVYSGSGGSSKNNEEMHDQKLERGNLALQMSLSRKNVIRVVRGFKDPGSLGGKVYMYDGLYKIHESWKERTKTGINCFKYKLLREPGQPEGMSIWKMSRKWVENPATRGRVLHPDLSSGTENLPVCLVNDVDSEKGPGLFTYITQVKYPKPLSSMKPLQGCSCLNACLPSDTDCDCAEFNGGNLPYSSTGLLVCRKNRLYECGESCQCSVNCRNRVTQKGIRVHFEIFRTGNRGWGLRSWDPIRAGSFICEYVGEVIDESKRNLDGEDEDDYLFQTVRPGEKTLKWDYVPELMGEQITNNSADTFEPLPIKISAKKMGNISRFMNHSCSPNAFWQPVQFDHGDDGHPHIMFFALKHIPPMTELTYDYGEIGADSGGIGSPGAKRCLCGSSNCRGYFC

SEQ ID NO: 999 - protein, 1252 aa, Triticum urartu
MGGKTIQVSGFPSTVNADHVKDLLEKIVGTGNVFAIKLRPPKNISANSKSFAIVQFQSEAHASLVLNAARRNALRSGSNHLKARYAERDIVPRPRTTIFNLQDATLHFGCLLREKVLSVLWSGTNVSVEFGFAMKRIDFCLIYNSKKYKLELSYESIWEIQLHRPPGLQKKFLLIQLFLFIESSEIFVNLSWRNVSVSQVQAAPKIYEQNIRRSGSMYDDPLFNYSRDDTDDQWTRTTDFTPSASIGQSYILCLELPHICYLPNIREYFVYYEVHDDVFHLQRGHSYSSNTCFVPVVKSHHFTDVPYEILFKINHLVQNGTLSGPTLDDNFYRLVSPGYECIDHIKRALEKMSYLKKTCLNPTKWLSEQYKKNRRSRYMLKSPNITLDDDGLVYVYRVQITPAKVYFYGPEINVSNRVVRHYAADLDNFLRISFVDEDCEKLRSTDLSQRSAPGNNTRRTALYNRVLSVLSNGITIGDKHFDFLAFSSSQLRDNSAWMFASRTGLSASDIREWMGDFRNIRNVAKYAARLGQSFSSSTETLKVHKYEVKEAPDVTNGTKYVFSDGIGTISADFADEVSKKCNLTCFTPSAFQIRYGGYKGVVAIDPTSRWKLSLRKSMSKFQSENITLDVLAYSKYQPCFLNRQLITLLSTLGVRDSIFELKQQEAVKQLNRMVAEPQAAIDAIELMPMGEVTNVVKELLLCGYQPDLEPYVSMLLQTFRASKLLELKTRSRIFVPKGRAMMGCLDETRTLEYGQVFIQVSNSADNRGKSIVTGKVVVAKNPCIHPGDIRILQAVQSPLLGHMVNCVVFPQLGPRQVFSNAFFYVFQPHPNECSGSDLDGDIYFVSWDPDLIPTRMVAPMDYTPAPTETLDHDVMIEEVHEYFTNYIVNESLGIIANAHVVFADREILKAESTPCIKLAELFSIAVDYPKTGVPAQIPPELHVKEYPDFMEKLDRATYVSKGVIGKLYREIKKQNPHIGHFTKDVARRSYDTDLIVDGYQDYITEAVWFKEQYDFKLGNLMEHYGINSEAEIISGCILKIANNFTKKNDADAIRLAVKSLRKEARSWFCEMGSDESGGGHEASDAKASAWYHVTYHPEYWGCYNEGYDHRPHFISFPCLDDEEWEVRFHFLDRDNLERTICLSDITFWNLIALIEVEGYSSRDFMYYVRDPGAAVSGMEELTDDDKVEEMLDHIASKGKNVVNITVMRSDAPRPVDLNIGHAYEEQVPLSEIRVPVVYEVDNSGVLFPSPVK

SEQ ID NO: 1000 - protein, 169 aa, Triticum aestivum
MASNQNQASYAAGETKARTEEKTGQMMDKAGQATEATKQKAGEAKDKTAQTAQAAKDRAAESKDQTGSFLGEKTEAAKQKTAEATDAAKQKASETAQYAQERSSDAAQYTKESAVAGKDKTGSVLQQAGETVVSAVVGAKDAVANTLGMGGDNTNTAKDSTTEKITRDH

SEQ ID NO: 1001 - protein, 947 aa, Triticum urartu
MGGKTLQVSGFPATVNADHVKDLLERIVGVDNVCVVKLRPPKNNSANSRSFAIVQFQTEAHASLVVNAARGNALRSGSNYLKKYRLELSYESIWEIQLHDPPGSQKKFLLIQVLAAPKIYEQNLQHSGSMYDDPLFNYFRDDTDDQWTRTTDFTPLASIGQSYILCLELPHDCDLPNIQEYFVYYKEHKRDFHCHRGHSYSSNTCFAPIVKSLYFTDIPYEILFKINHMVQNGTLSGPTLDDNFYRLDCEKLRSTDLSPRSAPGNNARRTALYNRILSVLSNGITIGNKHFEFLAFSSSQLRDNSAWMFASRPGLSASDIREWMGNFRNIRNVAKYAARLGQSFSASTETLKVHKYEVHVIPDIKNGTKYVFSDGIGTISADFADEVSKKCKLARFTPSAFQIRYGGYKGVVAIDPTSHWKLSLRGSMSKFPSDNITLDVLAYSKYQPCFLNRQLITLLSTLGVRDNIFELKQQEVVKQLNRMVTEPQAAIDAIELMPMGEITNVVKELLLCGYKPDVEPYLSMILQTFRASKLLELKTKSRIFIPEGRAMMGCLDETHTLKYGEVFIQASNSANDSDKFVVTGKVVVAKNPCLHPGDIRILEAVYTPVLDHMVNCVVFPQQGPRQQNLISVNMFLFGTRNQQWKIKQEVHEYFANYIVNESLGIIANAHVVFADRESLKAESTPCIKLAELFSVAVDYPKTGVPAQIPGELHVREYPDFMEKLDRVTYVSEGVIGKLYREIKKQSPHIGHFTKDVARRSYDSDLIVDGYQDYIDEAVWMKGEYDFKLGNLMEHYGIKSEAEIISGCILKMAKNFTKSSDADAIRQAVKSLRKEARSWFSEMNASESGDVPEALYAKASAWYHVTYHPEYWGCYNEVYGRPHLISFPCAWCIEMNGGSKFRDCETADNWWSGSEEKSTETTNSDSTDMVSGVLNMLQKVVSLRNAMP

SEQ ID NO: 1002 - protein, 1512 aa, Triticum urartu
MASEPEEGLHFLQSKMVPVNVCQDLGLYWSDKEWGRLLPMTCLSALPATSRMDSQLVELCISRCGEWLVSSVAYSLQCGSNKLNYTKCINSLEELLHAKVCSVDNAELESVLAFPDMEVYTYVPLSHSNLTVTYNKELDRSKLESERILRESLYDFKDSQKKLKSLGRLHGNLVFCLQELGSFGALQAAKAFLSSDGDVLDRKESDMNDNSTRFKHHYLNKAISVLNCNILDALHESDKTCFLGTHDDSFHLEMLEEPFFSNKIVVLIKILSRYRLEENMKCIVFVKRITVARAIAHILQNLKGLDLWKCEFLVGRHSGPKNMSRQKMDAIVENFSSGEVNLLIATSVGEEGLDIQTCCLVVRFDLPETVASFIQSRGRARMTNSKYVVLLERGNHSQEKLLNDYIDGEGIMNGEIDLRTSNDVFDHLEEKSYRVEKTGASISTACSVSLLHRYCYNLPKDMFFNPSPAFIYIDDTEGIICRVILPPNAAFRQVDGQPCQSNDEAKRDACLEAYVKLYELGALTDFLLPGSGSGKNRASTTNGSASNSHDDESLREELHEMLIPTILKPSTCKLDCPLNLHFYYIQFFPIPADRHYRIFGLFVINSLPMEAEKLEVDLHLARGRIVKAGKKQFGAMMLARNFQEMFLKVLLDRSEFTVSHVMLLGNSETLQFNSTFYLLLPIKQELYGDIFMIDWQTVKRCLSSPVFKDPTGVSAHGSYLPDESLRLLDNMYSKTDVVGSLIFAPHIKTFFVIDVILNELNARSEYDGATYEDHYKERFGIKLSHPEQPLLHAKQLCNLHNLLHDRLRETTEEGRELMEHFVELPPELCSLKIIGFSKDMCSSLSLLPSLMCRLENLLVAIELKDVMLSSFSEASQISASGILEALTTERCLERISLERFEVLGDAFLKYVVGRHNFLTYEGLDEGQLTSRRSAIVNNSHLYELSIKRNLQVYIRDQHFEPTQFIALGRPCKVVCNADTEVNIHTDSRENCNLRCTKSHHWLHRKTIADAVESLVGAFLVEGGFKAAFAFLHWVGIDVDFKDSSLYRVLDASSINLSLTNHTDVGELEELIGYNFKHKGLILEAFVHPSFNKHSGGCYQKLEFLGDAVLEYLITSYLYSAYPDLKPGQITDLKSLAVSNNSLAYVAVQKGIHKYLIKDSNYLSSAVNKFENYIRLPNSEKDLVEEPACPKVLGDIVESCVAAVLLDSGFNLNYVWTLVLMLLKPVLSFSDMHMNPMREIRELCQSHELELGLPEPMKADGEYHVKVEVNINSQVISSAAANRNSKVARKFAAQETLSKLKNYGYTHKNKSLEEILRDARKKEPELLGYNEEPIKVEADISAETNNLKIGKERDANISFQNTAISIRGTLRTSSQRTAGNTMFSKDDVSIERNNQLKVAKQNACLPKGTTQKNIRKEYHGDMVNKTAKSFLFEVCAVSYWIPPEFELCKEEGPSHLRRFTYKVTVQIRGPSETLLECYSDAQLQKKAAQEHAAQGALWYLRQHGYLPKDEVRV

SEQ ID NO: 1003 - protein, 814 aa, Triticum aestivum
MSGTAAPRYAPDDPTVPKPWRGLVDGTTGYLYYWNPDTNVTQYEKPVPPEAQLPPPPPLPPPPPRARGRDRRDRSRSRSRSRSRTPPRREHRDRDRDRDRRRHDEHDSFKPSSSHHHLPPAATIIPTAAADDPSAEAYRRRHEITVIGDNVPAPITEFDSGVIPLDILKEIQRAGFPSPTPIQAQSWPIALLNQDVVAIAKTGSGKTLGYLLPGFMHIKRMQNSTRSGPTVLVLAPTRELATQILEEAVKFGRSSRISSTCLYGGAPKGPQLRDLERGVDVVVATPGRLNDILEMRKISLKQVSYLVLDEADRMLDMGFEPQIRKIVRDIPSGRQTLMYTATWPKEVRRIADELLVHPVQVTIGSVDELVANKAITQHVEVVTPSEKLWRLEQILRSHDSGSKILIFCTTKRMCDQLSRTLNRQFGAAAIHGDKSQNEREKVLSQFRSGRSPILVATDVAARGLDIKDIRVVINYDFPTGVEDYVHRIGRTGRAGATGLAYTFLCDQDSKYAADLIKILEGADQDVPPELLDMVSRGGRGRKRNKWATRSERGGGSRPELDSRYGGRLEGSRGGRGKDDYGGRSRNDHGGSRRSARGRSRSLSRSDSDRRSPSPKRRRHDVQSSRSRTRSRSRSRSRSRSRSRNKSRNRSRSRSYTRNRRASRSRSRSPGARRRPERRAGSGSTRPDSAHPVEKKSSPNAHPSNDHRSRSVDPSNDYQAEDGKMGKVDLDRSPSPQEQDDKSAPYSSVYNGEGGRGSMSPNGEPVVDAKPVEVSVSSKKREDEEEGMIDEEGEEGMIADDDPRASAAVQNGGDK

SEQ ID NO: 1004 - protein, 779 aa, Triticum urartu
MIVRANHFLVGFADKDICHYDVAITPEPKTRRINRVLMTELTSKHRVSSLGGLLVAYDGSKSLYTAGELPFQAMDFSIKLGKPPRETYVTVSRSFYSTIFGQRDIGDGLECWRGYYQSLRPTQMGLSLNIDISSTPFYKPISVMQFVQECLNLRNPDPNRPLSDRDRLKLRKALRGIRVETTHQEGKRSAYKITGITSVPLIQLNFPLDEGNQMTVVQYFWGRYKYRLRFTSWPCLQSGNDSRPIYLPMEVCKIIEGQRFTRKLNEKQVTGILRATCERPRDRENSILKMVEHNNYSADKLAQEFGIDVTDKMLKYHESGKDKACAPSVGQWNMIGKKMINGGNVQRWTCLNFSRLHIDGVKRFCGDLVKMCNAIGMVFNPMPVVEILSASANNIEGALKDAHQSARDLQLLIVILPDVTGHYGKVKKVCETDLGIVSQCLKPDKVERANKQYFENVALKVNVKVGGRNTALQQALTRQIPLVTDQPTIFFGADVTHPAAGDDSSPSIAAVVASMDWPEITKYKAVVSAQPPRQEIIQDLYCTGIDPEKGTPVHSGMMRELLVSFFQKTKHKPSRIIFYRDGVSEGQFAQVLMYEMDAIRKACASLQEDYQPPVTFVVVQKRHHTRLFPEVHGKETDKSGNILPGTVVDTNICHPTEFDFYLCSHAGIQGTSRPTHYHVLFDENRFTADGLQLLTNNLCYTYARCTRSVSVVPPAYYAHLAAFRARYYDEPSEGSDSASIVSGGTRESAATGAGAAGPPGTYRRLPRIRDNVKDVMFYC

SEQ ID NO: 1005 - protein, 916 aa, Triticum aestivum
MESHSDDLPPPPPLPPNAEPIKAESADDLPPPPPLPPIKPEEAKKISKPKRALIARPGFGKRGNPIQLVTNHFKVSLKTTDEFFHHYYVNLKYEDDRPVDGKGVGRKVIDKLAQTYPSELAHKDFAYDGEKSLFTIGALPQINNEFVVVLEDVSSGKTPANGSPGNDSPDKKRVKRPYQTKTFKVELSFAARIPMSAIAMALKGQESEHTQEAVRVIDIILRQHSSKQGCLLVRQSLFHNNPSNFVDLGGGVMGCRGFHSSFRATQSGLSLNIDVSTTMIVKPGPVVDFLLANQKVDHPNKIDWAKAKRALKNLRIKTSPANTEYKIVGLSERNCYEQMFSLKQRNGGNGDPEAIEISVYDYFVKNRGIELRYSGDFPCINVGKPRRPTYFPIELCQLVPLQRYTKSLSTLQRPSLVEKSRQKPQERMSVLSDVLKRSSYDTEPMLKACGISIAQGFTQVAGRVLQAPKLKAGNGEDIFTRNGRWNFNNKRLARACVVDRWAVVNFSARCNTMNLVNDLIKCGGMKGNTVEKPHIVIEENGSMRRAPAPKRVEDMFEQVKSKLPGAPKFLLCILAERKNSDVYGPWKRKCLADFGFVTQCVAPTRVNDQYLTNVLLKINAKLGGMNSLQQIEMSPSIPLVSKVPTLILGMDVSHGSPGQSDIPSIAAVVGSREWPLVSKYRASVRSQSPKLEMIDSLFKPQGTDDDGLVRECLIDFYTSSGKRKPDQIIIFRDGVSESQFNQVLNIELDQIIEACKFLDENWNPKFTLIVAQKNHHTKFFIPGSPDNVPPGTVVDNAVCHPRNYDFYMCAHAGMIGTTRPTHYHILHDEIHFAADDLQDLVHSLSYVYQRSTTAISVVSPICYAHLAAAQVAQFIKFDEMSETSSSQGGGHTSAGSAPVQELPRPHEKVRSSMFFC

SEQ ID NO: 1006 - DNA, 11405 bp, synthetic construct
  source 1..11405: mol_type = other DNA
tggcaggatatattgtggtgtaaacaaattgacgcttagacaacttaataacacattgcggacgtttttaatgtactgaattaacgccgaattaattcgagctcggatctgataatttatttgaaaattcataagaaaagcaaacgttacatgaattgatgaaacaatacaaagacagataaagccacgcacatttaggatattggccgagattactgaatattgagtaagatcacggaatttctgacaggagcatgtcttcaattcagcccaaatggcagttgaaatactcaaaccgccccatatgcaggagcggatcattcattgtttgtttggttgcctttgccaacatgggagtccaagattctgcagttagatctcggtgacgggcaggaccggacggggcggtaccggcaggctgaagtccagctgccagaaacccacgtcatgccagttcccgtgcttgaagccggccgcccgcagcatgccgcggggggcatatccgagcgcctcgtgcatgcgcacgctcgggtcgttgggcagcccgatgacagcgaccacgctcttgaagccctgtgcctccagggacttcagcaggtgggtgtagagcgtggagcccagtcccgtccgctggtggcggggggagacgtacacggtcgactcggccgtccagtcgtaggcgttgcgtgccttccaggggcccgcgtaggcgatgccggcgacctcgccgtccacctcggcgacgagccagggatagcgctcccgcagacggacgaggtcgtccgtccactcctgcggttcctgcggctcggtacggaagttgaccgtgcttgtctcgatgtagtggttgacgatggtgcagaccgccggcatgtccgcctcggtggcacggcggatgtcggccgggcgtcgttctgggctcatcgattcgatttggtgtatcgagattggttatgaaattcagatgctagtgtaatgtattggtaatttgggaagatataataggaagcaaggctatttatccatttctgaaaaggcgaaatggcgtcaccgcgagcgtcacgcgcattccgttcttgctgtaaagcgttgtttggtacacttttgactagcgaggcttggcgtgtcagcgtatctattcaaaagtcgttaatggctgcggatcaagaaaaagttggaatagaaacagaatacccgcgaaattcaggcccggttgccatgtcctacacgccgaaataaacgaccaaattagtagaaaaataaaaactagctcagatacttacgtcacgtcttgcgcactgatttgaaaaatctcagaattccaatcccacaaaaatctgagcttaacagcacagttgctcctctcagagcagaatcgggtattcaacaccctcatatcaactactacgttgtgtataacggtccacatgccggtatatacgatgactggggttgtacaaaggcggcaacaaacggcgttcccggagttgcacacaagaaatttgccactattacagaggcaagagcagcagctgacgcgtacacaacaagtcagcaaacagacaggttgaacttcatccccaaaggagaagctcaactcaagcccaagagctttgctaaggccctaacaagcccaccaaagcaaaaagcccactggctcacgctaggaaccaaaaggcccagcagtgatccagccccaaaagagactcctttgccccggagattacaatggacgatttcctctatctttacgatctaggaaggaagttcgaaggtgaaggtgacgacactatgttcaccactgataatgagaaggttagcctcttcaatttcagaaagaatgctgacccacagatggttagagaggcctacgcagcaggtctcatcaagacgatctacccgagtaacaatctccaggagatcaaataccttcccaagaaggttaaagatgcagtcaaaagattcaggactaattgcatcaagaacacagagaaagacatatttctcaagatcagaagtactattccagtatggacgattcaaggcttgcttcataaaccaaggcaagtaatagagattggagtctctaaaaaggtagttcctactgaatctaaggccatgcatggagtctaagattcaaatcgaggatctaacagaactcgccgtgaagactggcgaacagttcatacagagtcttttacgactcaatgacaagaagaaaatcttcgtcaacatggtggagcacgacactctggtctactccaaaaatgtcaaagatacagtctcagaagaccaaagggctattgagacttttcaacaaaggataatttcgggaaacctcctcggattccattgcccagctatctgtcacttcatcgaaaggacagtagaaaaggaaggtggctcctacaaatgccatcattgcgataaaggaaaggctatcattcaagatctctctgccgacagtggtcccaaagatggacccccacccacgaggagcatcgtggaaaaagaagacgttccaaccacgtcttcaaagcaagtggattgatgtgacatctccactgacgtaagggatgacgcacaatcccactatccttcgcaagacccttcctctatataaggaagttcatttcatttggagaggacacgctcgagtataagagctctatttttacaacaattaccaacaacaacaaacaacaaacaacattacaattacatttacaattaccatggggcgcgcccaatcgatgatttaaatgtgtaagaatttcttatgttacattattacattcaacgttttatcttaattggctcttcatttgattgaaatttgacaattatttcttgtttttttttttgtcacactctttttgggttggggtggccgacgaattgtgggaaggtagaaagaggggaggacttttgttatactccattagtaattactgtttccgtttcaatttatgtgacaatatttcctttttagtcggttccaaaagaaaatgtcagcattataaacaatttaattttgaaattacaattttgccattaataaaatgatttacaaccacaaaagtatctatgagcctgtttgggtgggcttataagcagcttattttaagtggcttataagtcaaaaagtgacantttttgagaagttagaaaatcctaacttctcaaaaagtagcttttaagccacttatgacttataagtccaaaaatttttaagttaccaaacatatattaatgggtttataagcttataagccacttttaagctcacccaaacgggttctatgtctcactttagactacaaattttaaaagtcttcatttatttcttaatctccgtggcgagtnaaactataacacataaagtgaaacggagggaataagatggagtcataaactaatccaaatctatactctctccgttaatttgttttttagtttgatttggtacattaataaaacagatttttcgaaggttataaacacagacagatgtttcccagcgagctagcaaaattccaagatttctgtcgaaaattcgtgtgtttctagctagtacttgatgttatctttaaccttttagtaattttttgtccttttctttctatttttcatcttacaatgaattatgagcaagttccttaagtagcatcacacgtgagatgttttttatgatattgactaaatccaatctttaccattccttaactagtaaaatacaacacatgttaattgatacattgcttaacactgaggttagaaaattttagaaattagttgtccaaatgctttgaaattagaaatctttaatcccttatttttttttaaaatgttttttctcactccaaagaaagagaaactgacatgaaagctcaaaagatcatgaatcttactaactttgtggaactaaatgtacatcagaatgtttctgacatgtgaaaatgaaagctcttaattttcttcttttatttattgagggtttttgcatgctatgcattcaatttgagtactttaaagcacctataaacacttacttacacttgccttggagtttatgttttagtgttttcttcacatcttttttggtcaatttgcaggtatttggatcctaggtgagtctagagagttaattaagacccgggactagtccctagagtcctgctttaatgagatatgcgagacgcctatgatcgcatgatatttgctttcaattctgttgtgcacgttgtaaaaaacctgagcatgtgtagctcagatccttaccgccggtttcggttcattctaatgaatatatcacccgttactatcgtatttttatgaataatattctccgttcaatttactgattgtaccctactacttatatgtacaatattaaaatgaaaacaatatattgtgctgaataggtttatagcgacatctatgatagagcgccacaataacaaacaattgcgttttattattacaaatccaattttaaaaaaagcggcagaaccggtcaaacctaaaagactgattacataaatcttattcaaatttcaaaagtgccccaggggctagtatctacgacacaccgagcggcgaactaataacgctcactgaagggaactccggttccccgccggcgcgcatgggtgagattccttgaagttgagtattggccgtccgctctaccgaaagttacgggcaccattcaacccggtccagcacggcggccgggtaaccgacttgctgccccgagaattatgcagcatttttttggtgtatgtgggccccaaatgaagtgcaggtcaaaccttgacagtgacgacaaatcgttgggcgggtccagggcgaattttgcgacaacatgtcgaggctcagcaggacctgcaggcatgcaagcttggcactggccgtcgttttacaacgtcgtgactgggaaaaccctggcgttacccaacttaatcgccttgcagcacatccccctttcgccagctggcgtaatagcgaagaggcccgcaccgatcgcccttcccaacagttgcgcagcctgaatggcgaatgctagagcagcttgagcttggatcagattgtcgtttcccgccttcagtttaaactatcagtgtttgacaggatatattggcgggtaaacctaagagaaaagagcgtttattagaataacggatatttaaaagggcgtgaaaaggtttatccgttcgtccatttgtatgtgcatgccaaccacagggttcccctcgggatcaaagtactttgatccaacccctccgctgctatagtgcagtcggcttctgacgttcagtgcagccgtcttctgaaaacgacatgtcgcacaagtcctaagttacgcgacaggctgccgccctgcccttttcctggcgttttcttgtcgcgtgttttagtcgcataaagtagaatacttgcgactagaaccggagacattacgccatgaacaagagcgccgccgctggcctgctgggctatgcccgcgtcagcaccgacgaccaggacttgaccaaccaacgggccgaactgcacgcggccggctgcaccaagctgttttccgagaagatcaccggcaccaggcgcgaccgcccggagctggccaggatgcttgaccacctacgccctggcgacgttgtgacagtgaccaggctagaccgcctggcccgcagcacccgcgacctactggacattgccgagcgcatccaggaggccggcgcgggcctgcgtagcctggcagagccgtgggccgacaccaccacgccggccggccgcatggtgttgaccgtgttcgccggcattgccgagttcgagcgttccctaatcatcgaccgcacccggagcgggcgcgaggccgccaaggcccgaggcgtgaagtttggcccccgccctaccctcaccccggcacagatcgcgcacgcccgcgagctgatcgaccaggaaggccgcaccgtgaaagaggcggctgcactgcttggcgtgcatcgctcgaccctgtaccgcgcacttgagcgcagcgaggaagtgacgcccaccgaggccaggcggcgcggtgccttccgtgaggacgcattgaccgaggccgacgccctggcggccgccgagaatgaacgccaagaggaacaagcatgaaaccgcaccaggacggccaggacgaaccgtttttcattaccgaagagatcgaggcggagatgatcgcggccgggtacgtgttcgagccgcccgcgcacgtctcaaccgtgcggctgcatgaaatcctggccggtttgtctgatgccaagctggcggcctggccggccagcttggccgctgaagaaaccgagcgccgccgtctaaaaaggtgatgtgtatttgagtaaaacagcttgcgtcatgcggtcgctgcgtatatgatgcgatgagtaaataaacaaatacgcaaggggaacgcatgaaggttatcgctgtacttaaccagaaaggcgggtcaggcaagacgaccatcgcaacccatctagcccgcgccctgcaactcgccggggccgatgttctgttagtcgattccgatccccagggcagtgcccgcgattgggcggccgtgcgggaagatcaaccgctaaccgttgtcggcatcgaccgcccgacgattgaccgcgacgtgaaggccatcggccggcgcgacttcgtagtgatcgacggagcgccccaggcggcggacttggctgtgtccgcgatcaaggcagccgacttcgtgctgattccggtgcagccaagcccttacgacatatgggccaccgccgacctggtggagctggttaagcagcgcattgaggtcacggatggaaggctacaagcggcctttgtcgtgtcgcgggcgatcaaaggcacgcgcatcggcggtgaggttgccgaggcgctggccgggtacgagctgcccattcttgagtcccgtatcacgcagcgcgtgagctacccaggcactgccgccgccggcacaaccgttcttgaatcagaacccgagggcgacgctgcccgcgaggtccaggcgctggccgctgaaattaaatcaaaactcatttgagttaatgaggtaaagagaaaatgagcaaaagcacaaacacgctaagtgccggccgtccgagcgcacgcagcagcaaggctgcaacgttggccagcctggcagacacgccagccatgaagcgggtcaactttcagttgccggcggaggatcacaccaagctgaagatgtacgcggtacgccaaggcaagaccattaccgagctgctatctgaatacatcgcgcagctaccagagtaaatgagcaaatgaataaatgagtagatgaattttagcggctaaaggaggcggcatggaaaatcaagaacaaccaggcaccgacgccgtggaatgccccatgtgtggaggaacgggcggttggccaggcgtaagcggctgggttgtctgccggccctgcaatggcactggaacccccaagcccgaggaatcggcgtgacggtcgcaaaccatccggcccggtacaaatcggcgcggcgctgggtgatgacctggtggagaagttgaaggccgcgcaggccgcccagcggcaacgcatcgaggcagaagcacgccccggtgaatcgtggcaagcggccgctgatcgaatccgcaaagaatcccggcaaccgccggcagccggtgcgccgtcgattaggaagccgcccaagggcgacgagcaaccagattttttcgttccgatgctctatgacgtgggcacccgcgatagtcgcagcatcatggacgtggccgttttccgtctgtcgaagcgtgaccgacgagctggcgaggtgatccgctacgagcttccagacgggcacgtagaggtttccgcagggccggccggcatggccagtgtgtgggattacgacctggtactgatggcggtttcccatctaaccgaatccatgaaccgataccgggaagggaagggagacaagcccggccgcgtgttccgtccacacgttgcggacgtactcaagttctgccggcgagccgatggcggaaagcagaaagacgacctggtagaaacctgcattcggttaaacaccacgcacgttgccatgcagcgtacgaagaaggccaagaacggccgcctggtgacggtatccgagggtgaagccttgattagccgctacaagatcgtaaagagcgaaaccgggcggccggagtacatcgagatcgagctagctgattggatgtaccgcgagatcacagaaggcaagaacccggacgtgctgacggttcaccccgattactttttgatcgatcccggcatcggccgttttctctaccgcctggcacgccgcgccgcaggcaaggcagaagccagatggttgttcaagacgatctacgaacgcagtggcagcgccggagagttcaagaagttctgtttcaccgtgcgcaagctgatcgggtcaaatgacctgccggagtacgatttgaaggaggaggcggggcaggctggcccgatcctagtcatgcgctaccgcaacctgatcgagggcgaagcatccgccggttcctaatgtacggagcagatgctagggcaaattgccctagcaggggaaaaaggtcgaaaaggtctctttcctgtggatagcacgtacattgggaacccaaagccgtacattgggaaccggaacccgtacattgggaacccaaagccgtacattgggaaccggtcacacatgtaagtgactgatataaaagagaaaaaaggcgatttttccgcctaaaactctttaaaacttattaaaactcttaaaacccgcctggcctgtgcataactgtctggccagcgcacagccgaagagctgcaaaaagcgcctacccttcggtcgctgcgctccctacgccccgccgcttcgcgtcggcctatcgcggccgctggccgctcaaaaatggctggcctacggccaggcaatctaccagggcgcggacaagccgcgccgtcgccactcgaccgccggcgcccacatcaaggcaccctgcctcgcgcgtttcggtgatgacggtgaaaacctctgacacatgcagctcccggagacggtcacagcttgtctgtaagcggatgccgggagcagacaagcccgtcagggcgcgtcagcgggtgttggcgggtgtcggggcgcagccatgacccagtcacgtagcgatagcggagtgtatactggcttaactatgcggcatcagagcagattgtactgagagtgcaccatatgcggtgtgaaataccgcacagatgcgtaaggagaaaataccgcatcaggcgctcttccgcttcctcgctcactgactcgctgcgctcggtcgttcggctgcggcgagcggtatcagctcactcaaaggcggtaatacggttatccacagaatcaggggataacgcaggaaagaacatgtgagcaaaaggccagcaaaaggccaggaaccgtaaaaaggccgcgttgctggcgtttttccataggctccgcccccctgacgagcatcacaaaaatcgacgctcaagtcagaggtggcgaaacccgacaggactataaagataccaggcgtttccccctggaagctccctcgtgcgctctcctgttccgaccctgccgcttaccggatacctgtccgcctttctcccttcgggaagcgtggcgctttctcatagctcacgctgtaggtatctcagttcggtgtaggtcgttcgctccaagctgggctgtgtgcacgaaccccccgttcagcccgaccgctgcgccttatccggtaactatcgtcttgagtccaacccggtaagacacgacttatcgccactggcagcagccactggtaacaggattagcagagcgaggtatgtaggcggtgctacagagttcttgaagtggtggcctaactacggctacactagaaggacagtatttggtatctgcgctctgctgaagccagttaccttcggaaaaagagttggtagctcttgatccggcaaacaaaccaccgctggtagcggtggtttttttgtttgcaagcagcagattacgcgcagaaaaaaaggatctcaagaagatcctttgatcttttctacggggtctgacgctcagtggaacgaaaactcacgttaagggattttggtcatgcattctaggtactaaaacaattcatccagtaaaatataatattttattttctcccaatcaggcttgatccccagtaagtcaaaaaatagctcgacatactgttcttccccgatatcctccctgatcgaccggacgcagaaggcaatgtcataccacttgtccgccctgccgcttctcccaagatcaataaagccacttactttgccatctttcacaaagatgttgctgtctcccaggtcgccgtgggaaaagacaagttcctcttcgggcttttccgtctttaaaaaatcatacagctcgcgcggatctttaaatggagtgtcttcttcccagttttcgcaatccacatcggccagatcgttattcagtaagtaatccaattcggctaagcggctgtctaagctattcgtatagggacaatccgatatgtcgatggagtgaaagagcctgatgcactccgcatacagctcgataatcttttcagggctttgttcatcttcatactcttccgagcaaaggacgccatcggcctcactcatgagcagattgctccagccatcatgccgttcaaagtgcaggacctttggaacaggcagctttccttccagccatagcatcatgtccttttcccgttccacatcataggtggtccctttataccggctgtccgtcatttttaaatataggttttcattttctcccaccagcttatataccttagcaggagacattccttccgtatcttttacgcagcggtatttttcgatcagttttttcaattccggtgatattctcattttagccatttattatttccttcctcttttctacagtatttaaagataccccaagaagctaattataacaagacgaactccaattcactgttccttgcattctaaaaccttaaataccagaaaacagctttttcaaagttgttttcaaagttggcgtataacatagtatcgacggagccgattttgaaaccgcggtgatcacaggcagcaacgctctgtcatcgttacaatcaacatgctaccctccgcgagatcatccgtgtttcaaacccggcagcttagttgccgttcttccgaatagcatcggtaacatgagcaaagtctgccgccttacaacggctctcccgctgacgccgtcccggactgatgggctgcctgtatcgagtggtgattttgtgccgagctgccggtcggggagctgttggctggctgg

SEQ ID NO: 1007 - DNA, 3367 bp, synthetic construct
  source 1..3367: mol_type = other DNA
ggaaattgtaaacgttaatattttgttaaaattcgcgttaaatttttgttaaatcagctcattttttaaccaataggccgaaatcggcaaaatcccttataaatcaaaagaatagaccgagatagggttgagtgttgttccagtttggaacaagagtccactattaaagaacgtggactccaacgtcaaagggcgaaaaaccgtctatcagggcgatggcccactacgtgaaccatcaccctaatcaagttttttggggtcgaggtgccgtaaagcactaaatcggaaccctaaagggagcccccgatttagagcttgacggggaaagccggcgaacgtggcgagaaaggaagggaagaaagcgaaaggagcgggcgctagggcgctggcaagtgtagcggtcacgctgcgcgtaaccaccacacccgccgcgcttaatgcgccgctacagggcgcgtcgcgccattcgccattcaggctgcgcaactgttgggaagggcgatcggtgcgggcctcttcgctattacgccagctggcgaaagggggatgtgctgcaaggcgattaagttgggtaacgccagggttttcccagtcacgacgttgtaaaacgacggccagtgaattgtaatacgactcactatagggcgaattgggtaccgggccccccctcgaggtcgacggtatcgataagcttgatatcgaattcctgcagccccaaacacacgctcggacgcatattacacatgttcatacacttaatactcgctgttttgaattgatgttttaggaatatatatgtagagagagcttccttgagtccattcacaggtcgtgatatgattcaattagcttccgactcattcatccaaataccgagtcgccaaaattcaaactagactcgttaaatgaagaatgatgcggtagacaaattggatcattgattctctttgattggactgaagggagctccctctctcttttgtattccaattttcttgattaatctttcctgcacaaaaacatgcttgatccactaagtgacatatatgctgccttcgtatatatagttctggtaaaattaacattttgggtttatctttatttaaggcatcgccatggggggatccactagttctagagcggccgccaccgcggtggagctccagcttttgttccctttagtgagggttaatttcgagcttggcgtaatcatggtcatagctgtttcctgtgtgaaattgttatccgctcacaattccacacaacatacgagccggaagcataaagtgtaaagcctggggtgcctaatgagtgagctaactcacattaattgcgttgcgctcactgcccgctttccagtcgggaaacctgtcgtgccagctgcattaatgaatcggccaacgcgcggggagaggcggtttgcgtattgggcgctcttccgcttcctcgctcactgactcgctgcgctcggtcgttcggctgcggcgagcggtatcagctcactcaaaggcggtaatacggttatccacagaatcaggggataacgcaggaaagaacatgtgagcaaaaggccagcaaaaggccaggaaccgtaaaaaggccgcgttgctggcgtttttccataggctccgcccccctgacgagcatcacaaaaatcgacgctcaagtcagaggtggcgaaacccgacaggactataaagataccaggcgtttccccctggaagctccctcgtgcgctctcctgttccgaccctgccgcttaccggatacctgtccgcctttctcccttcgggaagcgtggcgctttctcatagctcacgctgtaggtatctcagttcggtgtaggtcgttcgctccaagctgggctgtgtgcacgaaccccccgttcagcccgaccgctgcgccttatccggtaactatcgtcttgagtccaacccggtaagacacgacttatcgccactggcagcagccactggtaacaggattagcagagcgaggtatgtaggcggtgctacagagttcttgaagtggtggcctaactacggctacactagaaggacagtatttggtatctgcgctctgctgaagccagttaccttcggaaaaagagttggtagctcttgatccggcaaacaaaccaccgctggtagcggtggtttttttgtttgcaagcagcagattacgcgcagaaaaaaaggatctcaagaagatcctttgatcttttctacggggtctgacgctcagtggaacgaaaactcacgttaagggattttggtcatgagattatcaaaaaggatcttcacctagatccttttaaattaaaaatgaagttttaaatcaatctaaagtatatatgagtaaacttggtctgacagttaccaatgcttaatcagtgaggcacctatctcagcgatctgtctatttcgttcatccatagttgcctgactccccgtcgtgtagataactacgatacgggagggcttaccatctggccccagtgctgcaatgataccgcgagacccacgctcaccggctccagatttatcagcaataaaccagccagccggaagggccgagcgcagaagtggtcctgcaactttatccgcctccatccagtctattaattgttgccgggaagctagagtaagtagttcgccagttaatagtttgcgcaacgttgttgccattgctacaggcatcgtggtgtcacgctcgtcgtttggtatggcttcattcagctccggttcccaacgatcaaggcgagttacatgatcccccatgttgtgcaaaaaagcggttagctccttcggtcctccgatcgttgtcagaagtaagttggccgcagtgttatcactcatggttatggcagcactgcataattctcttactgtcatgccatccgtaagatgcttttctgtgactggtgagtactcaaccaagtcattctgagaatagtgtatgcggcgaccgagttgctcttgcccggcgtcaatacgggataataccgcgccacatagcagaactttaaaagtgctcatcattggaaaacgttcttcggggcgaaaactctcaaggatcttaccgctgttgagatccagttcgatgtaacccactcgtgcacccaactgatcttcagcatcttttactttcaccagcgtttctgggtgagcaaaaacaggaaggcaaaatgccgcaaaaaagggaataagggcgacacggaaatgttgaatactcatactcttcctttttcaatattattgaagcatttatcagggttattgtctcatgagcggatacatatttgaatgtatttagaaaaataaacaaataggggttccgcgcacatttccccgaaaagtgccacctg

SEQ ID NO: 1008 - DNA, 18691 bp, synthetic construct
  source 1..18691: mol_type = other DNA
ggccgcactagtgatatcccgcggccatggcggccgggagcatgcgacgtcgggcccaattcgccctatagtgagtcgtattacaattcactggccgtcgttttacaacgtcgtgactgggaaaaccctggcgttacccaacttaatcgccttgcagcacatccccctttcgccagctggcgtaatagcgaagaggcccgcaccgatcgcccttcccaacagttgcgcagcctgaatggcgaatggaaattgtaaacgttaatgggtttctggagtttaatgagctaagcacatacgtcagaaaccattattgcgcgttcaaaagtcgcctaaggtcactatcagctagcaaatatttcttgtcaaaaatgctccactgacgttccataaattcccctcggtatccaattagagtctcatattcactctcaatccaaataatctgcaatggcaattaccttatccgcaacttctttacctatttccgcccggatccgggcaggttctccggccgcttgggtggagaggctattcggctatgactgggcacaacagacaatcggctgctctgatgccgccgtgttccggctgtcagcgcaggggcgcccggttctttttgtcaagaccgacctgtccggtgccctgaatgaactgcaggacgaggcagcgcggctatcgtggctggccacgacgggcgttccttgcgcagctgtgctcgacgttgtcactgaagcgggaagggactggctgctattgggcgaagtgccggggcaggatctcctgtcatctcaccttgctcctgccgagaaagtatccatcatggctgatgcaatgcggcggctgcatacgcttgatccggctacctgcccattcgaccaccaagcgaaacatcgcatcgagcgagcacgtactcggatggaagccggtcttgtcgatcaggatgatctggacgaagagcatcaggggctcgcgccagccgaactgttcgccaggctcaaggcgcgcatgcccgacggcgaggatctcgtcgtgacccatggcgatgcctgcttgccgaatatcatggtggaaaatggccgcttttctggattcatcgactgtggccggctgggtgtggcggaccgctatcaggacatagcgttggctacccgtgatattgctgaagagcttggcggcgaatgggctgaccgcttcctcgtgctttacggtatcgccgctcccgattcgcagcgcatcgccttctatcgccttcttgacgagttcttctgagcgggactctggggttcgaaatgaccgaccaagcgacgcccaacctgccatcacgagatttcgattccaccgccgccttctatgaaaggttgggcttcggaatcgttttccgggacgccggctggatgatcctccagcgcggggatctcatgctggagttcttcgcccaccccgatccaacacttacgtttgcaacgtccaagagcaaatagaccacgaacgccggaaggttgccgcagcgtgtggattgcgtctcaattctctcttgcaggaatgcaatgatgaatatgatactgactatgaaactttgagggaatactgcctagcaccgtcacctcataacgtgcatcatgcatgccctgacaacatggaacatcgctatttttctgaagaattatgctcgttggaggatgtcgcggcaattgcagctattgccaacatcgaactacccctcacgcatgcattcatcaatattattcatgcggggaaaggcaagattaatccaactggcaaatcatccagcgtgattggtaacttcagttccagcgacttgattcgttttggtgctacccacgttttcaataaggacgagatggtggagtaaagaaggagtgcgtcgaagcagatcgttcaaacatttggcaataaagtttcttaagattgaatcctgttgccggtcttgcgatgattatcatataatttctgttgaattacgttaagcatgtaataattaacatgtaatgcatgacgttatttatgagatgggtttttatgattagagtcccgcaattatacatttaatacgcgatagaaaacaaaatatagcgcgcaaactaggataaattatcgcgcgcggtgtcatctatgttactagatcgaattaattccaggcggtgaagggcaatcagctgttgcccgtctcactggtgaaaagaaaaaccaccccagtacattaaaaacgtccgcaatgtgttattaagttgtctaagcgtcaatttgtttacaccacaatatatcctgccaccagccagccaacagctccccgaccggcagctcggcacaaaatcaccactcgatacaggcagcccatcagtccgggacggcgtcagcgggagagccgttgtaaggcggcagactttgctcatgttaccgatgctattcggaagaacggcaactaagctgccgggtttgaaacacggatgatctcgcggagggtagcatgttgattgtaacgatgacagagcgttgctgcctgtgatcaaatatcatctccctcgcagagatccgaattatcagccttcttattcatttctcgcttaaccgtgacaggctgtcgatcttgagaactatgccgacataataggaaatcgctggataaagccgctgaggaagctgagtggcgctatttctttagaagtgaacgttgacgatgtcgacggatcttttccgctgcataaccctgcttcggggtcattatagcgattttttcggtatatccatcctttttcgcacgatatacaggattttgccaaagggttcgtgtagactttccttggtgtatccaacggcgtcagccgggcaggataggtgaagtaggcccacccgcgagcgggtgttccttcttcactgtcccttattcgcacctggcggtgctcaacgggaatcctgctctgcgaggctggccggctaccgccggcgtaacagatgagggcaagcggatggctgatgaaaccaagccaaccaggggtgatgctgccaacttactgatttagtgtatgatggtgtttttgaggtgctccagtggcttctgtttctatcagctgtccctcctgttcagctactgacggggtggtgcgtaacggcaaaagcaccgccggacatcagcgctatctctgctctcactgccgtaaaacatggcaactgcagttcacttacaccgcttctcaacccggtacgcaccagaaaatcattgatatggccatgaatggcgttggatgccgggcaacagcccgcattatgggcgttggcctcaacacgattttacgtcacttaaaaaactcaggccgcagtcggtaacctcgcgcatacagccgggcagtgacgtcatcgtctgcgcggaaatggacgaacagtggggctatgtcggggctaaatcgcgccagcgctggctgttttacgcgtatgacagtctccggaagacggttgttgcgcacgtattcggtgaacgcactatggcgacgctggggcgtcttatgagcctgctgtcaccctttgacgtggtgatatggatgacggatggctggccgctgtatgaatcccgcctgaagggaaagctgcacgtaatcagcaagcgatatacgcagcgaattgagcggcataacctgaatctgaggcagcacctggcacggctgggacggaagtcgctgtcgttctcaaaatcggtggagctgcatgacaaagtcatcgggcattatctgaacataaaacactatcaataagttggagtcattacccaaccaggaagggcagcccacctatcaaggtgtactgccttccagacgaacgaagagcgattgaggaaaaggcggcggcggccggcatgagcctgtcggcctacctgctggccgtcggccagggctacaaaatcacgggcgtcgtggactatgagcacgtccgcgagctggcccgcatcaatggcgacctgggccgcctgggcggcctgctgaaactctggctcaccgacgacccgcgcacggcgcggttcggtgatgccacgatcctcgccctgctggcgaagatcgaagagaagcaggacgagcttggcaaggtcatgatgggcgtggtccgcccgagggcagagccatgacttttttagccgctaaaacggccggggggtgcgcgtgattgccaagcacgtccccatgcgctccatcaagaagagcgacttcgcggagctggtattcgtgcagggcaagattcggaataccaagtacgagaaggacggccagacggtctacgggaccgacttcattgccgataaggtggattatctggacaccaaggcaccaggcgggtcaaatcaggaataagggcacattgccccggcgtgagtcggggcaatcccgcaaggagggtgaatgaatcggacgtttgaccggaaggcatacaggcaagaactgatcgacgcggggttttccgccgaggatgccgaaaccatcgcaagccgcaccgtcatgcgtgcgccccgcgaaaccttccagtccgtcggctcgatggtccagcaagctacggccaagatcgagcgcgacagcgtgcaactggctccccctgccctgcccgcgccatcggccgccgtggagcgttcgcgtcgtctcgaacaggaggcggcaggtttggcgaagtcgatgaccatcgacacgcgaggaactatgacgaccaagaagcgaaaaaccgccggcgaggacctggcaaaacaggtcagcgaggccaagcaggccgcgttgctgaaacacacgaagcagcagatcaaggaaatgcagctttccttgttcgatattgcgccgtggccggacacgatgcgagcgatgccaaacgacacggcccgctctgccctgttcaccacgcgcaacaagaaaatcccgcgcgaggcgctgcaaaacaaggtcattttccacgtcaacaaggacgtgaagatcacctacaccggcgtcgagctgcgggccgacgatgacgaactggtgtggcagcaggtgttggagtacgcgaagcgcacccctatcggcgagccgatcaccttcacgttctacgagctttgccaggacctgggctggtcgatcaatggccggtattacacgaaggccgaggaatgcctgtcgcgcctacaggcgacggcgatgggcttcacgtccgaccgcgttgggcacctggaatcggtgtcgctgctgcaccgcttccgcgtcctggaccgtggcaagaaaacgtcccgttgccaggtcctgatcgacgaggaaatcgtcgtgctgtttgctggcgaccactacacgaaattcatatgggagaagtaccgcaagctgtcgccgacggcccgacggatgttcgactatttcagctcgcaccgggagccgtacccgctcaagctggaaaccttccgcctcatgtgcggatcggattccacccgcgtgaagaagtggcgcgagcaggtcggcgaagcctgcgaagagttgcgaggcagcggcctggtggaacacgcctgggtcaatgatgacctggtgcattgcaaacgctagggccttgtggggtcagttccggctgggggttcagcagccagcgctttactggcatttcaggaacaagcgggcactgctcgacgcacttgcttcgctcagtatcgctcgggacgcacggcgcgctctacgaactgccgataaacagaggattaaaattgacaattgtgattaaggctcagattcgacggcttggagcggccgacgtgcaggatttccgcgagatccgattgtcggccctgaagaaagctccagagatgttcgggtccgtttacgagcacgaggagaaaaagcccatggaggcgttcgctgaacggttgcgagatgccgtggcattcggcgcctacatcgacggcgagatcattgggctgtcggtcttcaaacaggaggacggccccaaggacgctcacaaggcgcatctgtccggcgttttcgtggagcccgaacagcgaggccgaggggtcgccggtatgctgctgcgggcgttgccggcgggtttattgctcgtgatgatcgtccgacagattccaacgggaatctggtggatgcgcatcttcatcctcggcgcacttaatatttcgctattctggagcttgttgtttatttcggtctaccgcctgccgggcggggtcgcggcgacggtaggcgctgtgcagccgctgatggtcgtgttcatctctgccgctctgctaggtagcccgatacgattgatggcggtcctgggggctatttgcggaactgcgggcgtggcgctgttggtgttgacaccaaacgcagcgctagatcctgtcggcgtcgcagcgggcctggcgggggcggtttccatggcgttcggaaccgtgctgacccgcaagtggcaacctcccgtgcctctgctcacctttaccgcctggcaactggcggccggaggacttctgctcgttccagtagctttagtgtttgatccgccaatcccgatgcctacaggaaccaatgttctcggcctggcgtggctcggcctgatcggagcgggtttaacctacttcctttggttccgggggatctcgcgactcgaacctacagttgtttccttactgggctttctcagccgggatggcgctaagaagctattgccgccgatcttcatatgcggtgtgaaataccgcacagatgcgtaaggagaaaataccgcatcaggcgctcttccgcttcctcgctcactgactcgctgcgctcggtcgttcggctgcggcgagcggtatcagctcactcaaaggcggtaatacggttatccacagaatcaggggataacgcaggaaagaacatgtgagcaaaaggccagcaaaaggccaggaaccgtaaaaaggccgcgttgctggcgtttttccataggctccgcccccctgacgagcatcacaaaaatcgacgctcaagtcagaggtggcgaaacccgacaggactataaagataccaggcgtttccccctggaagctccctcgtgcgctctcctgttccgaccctgccgcttaccggatacctgtccgcctttctcccttcgggaagcgtggcgctttctcaatgctcacgctgtaggtatctcagttcggtgtaggtcgttcgctccaagctgggctgtgtgcacgaaccccccgttcagcccgaccgctgcgccttatccggtaactatcgtcttgagtccaacccggtaagacacgacttatcgccactggcagcagccactggtaacaggattagcagagcgaggtatgtaggcggtgctacagagttcttgaagtggtggcctaactacggctacactagaaggacagtatttggtatctgcgctctgctgaagccagttaccttcggaaaaagagttggtagctcttgatccggcaaacaaaccaccgctggtagcggtggtttttttgtttgcaagcagcagattacgcgcagaaaaaaaggatatcaagaagatcctttgatcttttctacggggtctgacgctcagtggaacgaaaactcacgttaagggattttggtcatgagattatcaaaaaggatcttcacctagatccttttaaattaaaaatgaagttttaaatcaatctaaagtatatatgagtaaacttggtctgacagttaccaatgcttaatcagtgaggcacctatctcagcgatctgtctatttcgttcatccatagttgcctgactccccgtcgtgtagataactacgatacgggagggcttaccatctggccccagtgctgcaatgataccgcgagacccacgctcaccggctccagatttatcagcaataaaccagccagccggaagggccgagcgcagaagtggtcctgcaactttatccgcctccatccagtctattaaacaagtggcagcaacggattcgcaaacctgtcacgccttttgtgccaaaagccgcgccaggtttgcgatccgctgtgccaggcgttaggcgtcatatgaagatttcggtgatccctgagcaggtggcggaaacattggatgctgagaaccatttcattgttcgtgaagtgttcgatgtgcacctatccgaccaaggctttgaactatctaccagaagtgtgagcccctaccggaaggattacatctcggatgatgactctgatgaagactctgcttgctatggcgcattcatcgaccaagagcttgtcgggaagattgaactcaactcaacatggaacgatctagcctctatcgaacacattgttgtgtcgcacacgcaccgaggcaaaggagtcgcgcacagtctcatcgaatttgcgaaaaagtgggcactaagcagacagctccttggcatacgattagagacacaaacgaacaatgtacctgcctgcaatttgtacgcaaaatgtggctttactctcggcggcattgacctgttcacgtataaaactagacctcaagtctcgaacgaaacagcgatgtactggtactggttctcgggagcacaggatgacgcctaacaattcattcaagccgacaccgcttcgcggcgcggcttaattcaggagttaaacatcatgagggaagcggtgatcgccgaagtatcgactcaactatcagaggtagttggcgtcatcgagcgccatctcgaaccgacgttgctggccgtacatttgtacggctccgcagtggatggcggcctgaagccacacagtgatattgatttgctggttacggtgaccgtaaggcttgatgaaacaacgcggcgagctttgatcaacgaccttttggaaacttcggcttcccctggagagagcgagattctccgcgctgtagaagtcaccattgttgtgcacgacgacatcattccgtggcgttatccagctaagcgcgaactgcaatttggagaatggcagcgcaatgacattcttgcaggtatcttcgagccagccacgatcgacattgatctggctatcttgctgacaaaagcaagagaacatagcgttgccttggtaggtccagcggcggaggaactctttgatccggttcctgaacaggatctatttgaggcgctaaatgaaaccttaacgctatggaactcgccgcccgactgggctggcgatgagcgaaatgtagtgcttacgttgtcccgcatttggtacagcgcagtaaccggcaaaatcgcgccgaaggatgtcgctgccgactgggcaatggagcgcctgccggcccagtatcagcccgtcatacttgaagctaggcaggcttatcttggacaagaagatcgcttggcctcgcgcgcagatcagttggaagaatttgttcactacgtgaaaggcgagatcaccaaggtagtcggcaaataatgtctaacaattcgttcaagccgacgccgcttcgcggcgcggcttaactcaagcgttagagagctggggaagactatgcgcgatctgttgaaggtggttctaagcctcgtacttgcgatggcatcggggcaggcacttgctgacctgccaattgttttagtggatgaagctcgtcttccctatgactactccccatccaactacgacatttctccaagcaactacgacaactccataagcaattacgacaatagtccatcaaattacgacaactctgagagcaactacgataatagttcatccaattacgacaatagtcgcaacggaaatcgtaggcttatatatagcgcaaatgggtctcgcactttcgccggctactacgtcattgccaacaatgggacaacgaacttcttttccacatctggcaaaaggatgttctacaccccaaaaggggggcgcggcgtctatggcggcaaagatgggagcttctgcggggcattggtcgtcataaatggccaattttcgcttgccctgacagataacggcctgaagatcatgtatctaagcaactagcctgctctctaataaaatgttaggagcttggctgccatttttggggtgaggccgttcgcggccgaggggcgcagcccctggggggatgggaggcccgcgttagcgggccgggagggttcgagaagggggggcaccccccttcggcgtgcgcggtcacgcgccagggcgcagccctggttaaaaacaaggtttataaatattggtttaaaagcaggttaaaagacaggttagcggtggccgaaaaacgggcggaaacccttgcaaatgctggattttctgcctgtggacagcccctcaaatgtcaataggtgcgcccctcatctgtcagcactctgcccctcaagtgtcaaggatcgcgcccctcatctgtcagtagtcgcgcccctcaagtgtcaataccgcagggcacttatccccaggcttgtccacatcatctgtgggaaactcgcgtaaaatcaggcgttttcgccgatttgcgaggctggccagctccacgtcgccggccgaaatcgagcctgcccctcatctgtcaacgccgcgccgggtgagtcggcccctcaagtgtcaacgtccgcccctcatctgtcagtgagggccaagttttccgcgaggtatccacaacgccggcggccggccgcggtgtctcgcacacggcttcgacggcgtttctggcgcgtttgcagggccatagacggccgccagcccagcggcgagggcaaccagcccggtgagcgtcggaaagggtcgacatcttgctgcgttcggatattttcgtggagttcccgccacagacccggattgaaggcgagatccagcaactcgcgccagatcatcctgtgacggaactttggcgcgtgatgactggccaggacgtcggccgaaagagcgacaagcagatcacgattttcgacagcgtcggatttgcgatcgaggatttttcggcgctgcgctacgtccgcgaccgcgttgagggatcaagccacagcagcccactcgaccttctagccgacccagacgagccaagggatctttttggaatgctgctccgtcgtcaggctttccgacgtttgggtggttgaacagaagtcattatcgtacggaatgccagcactcccgaggggaaccctgtggttggcatgcacatacaaatggacgaacggataaaccttttcacgcccttttaaatatccgttattctaataaacgctcttttctcttaggtttacccgccaatatatcctgtcaaacactgatagtttaaactgaaggcgggaaacgacaatctgatcatgagcggagaattaagggagtcacgttatgacccccgccgatgacgcgggacaagccgttttacgtttggaactgacagaaccgcaacgattgaaggagccactcagccccaatacgcaaaccgcctctccccgcgcgttggccgattcattaatgcagctggcacgacaggtttcccgactggaaagcgggcagtgagcgcaacgcaattaatgtgagttagctcactcattaggcaccccaggctttacactttatgcttccggctcgtatgttgtgtggaattgtgagcggataacaatttcacacaggaaacagctatgaccatgattacgccaagctatttaggtgacactatagaatactcaagctatgcatccaacgcgttgggagctctcccatatcgacctgcaggcggccgctcgacgaattaattccaatcccacaaaaatctgagcttaacagcacagttgctcctctcagagcagaatcgggtattcaacaccctcatatcaactactacgttgtgtataacggtccacatgccggtatatacgatgactggggttgtacaaaggcggcaacaaacggcgttcccggagttgcacacaagaaatttgccactattacagaggcaagagcagcagctgacgcgtacacaacaagtcagcaaacagacaggttgaacttcatccccaaaggagaagctcaactcaagcccaagagctttgctaaggccctaacaagcccaccaaagcaaaaagcccactggctcacgctaggaaccaaaaggcccagcagtgatccagccccaaaagagatctcctttgccccggagattacaatggacgatttcctctatctttacgatctaggaaggaagttcgaaggtgaaggtgacgacactatgttcaccactgataatgagaaggttagcctcttcaatttcagaaagaatgctgacccacagatggttagagaggcctacgcagcaggtctcatcaagacgatctacccgagtaacaatctccaggagatcaaataccttcccaagaaggttaaagatgcagtcaaaagattcaggactaattgcatcaagaacacagagaaagacatatttctcaagatcagaagtactattccagtatggacgattcaaggcttgcttcataaaccaaggcaagtaatagagattggagtctctaaaaaggtagttcctactgaatctaaggccatgcatggagtctaagattcaaatcgaggatctaacagaactcgccgtgaagactggcgaacagttcatacagagtcttttacgactcaatgacaagaagaaaatcttcgtcaacatggtggagcacgacactctggtctactccaaaaatgtcaaagatacagtctcagaagaccaaagggctattgagacttttcaacaaaggataatttcgggaaacctcctcggattccattgcccagctatctgtcacttcatcgaaaggacagtagaaaaggaaggtggctcctacaaatgccatcattgcgataaaggaaaggctatcattcaagatctctctgccgacagtggtcccaaagatggacccccacccacgaggagcatcgtggaaaaagaagacgttccaaccacgtcttcaaagcaagtggattgatgtgacatctccactgacgtaagggatgacgcacaatcccactatccttcgcaagacccttcctctatataaggaagttcatttcatttggagaggacacgctcgaggctagcatggatctcgggccccaaataatgattttattttgactgatagtgacctgttcgttgcaacaaattgatgagcaatgcttttttataatgccaactttgtacaaaaaagctgaacgagaaacgtaaaatgatataaatatcaatatattaaattagattttgcataaaaaacagactacataatactgtaaaacacaacatatccagtcactatgaatcaactacttagatggtattagtgacctgtagtcgaccgacagccttccaaatgttcttcgggtgatgctgccaacttagtcgaccgacagccttccaaatgttcttctcaaacggaatcgtcgtatccagcctactcgctattgtcctcaatgccgtattaaatcataaaaagaaataagaaaaagaggtgcgagcctcttttttgtgtgacaaaataaaaacatctacctattcatatacgctagtgtcatagtcctgaaaatcatctgcatcaagaacaatttcacaactcttatacttttctcttacaagtcgttcggcttcatctggattttcagcctctatacttactaaacgtgataaagtttctgtaatttctactgtatcgacctgcagactggctgtgtataagggagcctgacatttatattccccagaacatcaggttaatggcgtttttgatgtcattttcgcggtggctgagatcagccacttcttccccgataacggagaccggcacactggccatatcggtggtcatcatgcgccagctttcatccccgatatgcaccaccgggtaaagttcacgggagactttatctgacagcagacgtgcactggccagggggatcaccatccgtcgcccgggcgtgtcaataatatcactctgtacatccacaaacagacgataacggctctctcttttataggtgtaaaccttaaactgcatttcaccagtccctgttctcgtcagcaaaagagccgttcatttcaataaaccgggcgacctcagccatcccttcctgattttccgctttccagcgttcggcacgcagacgacgggcttcattctgcatggttgtgcttaccagaccggagatattgacatcatatatgccttgagcaactgatagctgtcgctgtcaactgtcactgtaatacgctgcttcatagcacacctctttttgacatacttcgggtagtgccgatcaacgtctcattttcgccaaaagttggcccagggcttcccggtatcaacagggacaccaggatttatttattctgcgaagtgatcttccgtcacaggtatttattcggcgcaaagtgcgtcgggtgatgctgccaacttagtcgactacaggtcactaataccatctaagtagttgattcatagtgactggatatgttgtgttttacagtattatgtagtctgttttttatgcaaaatctaatttaatatattgatatttatatcattttacgtttctcgttcagctttcttgtacaaagttggcattataagaaagcattgcttatcaatttgttgcaacgaacaggtcactatcagtcaaaataaaatcattatttgccatccagctgcagctcctcgaggaattcggtaccccaattggtaaggaaataattattttcttttttccttttagtataaaatagttaagtgatgttaattagtatgattataataatatagttgttataattgtgaaaaaataatttataaatatattgtttacataaacaacatagtaatgtaaaaaaatatgacaagtgatgtgtaagacgaagaagataaaagttgagagtaagtatattatttttaatgaatttgatcgaacatgtaagatgatatacggccggtaagaggttccaactttcaccataatgaaataagatcactaccgggcgtattttttgagttatcgagattttcaggagctaaggaagctaaaatggagaaaaaaatcactggatataccaccgttgatatatcccaatggcatcgtaaagaacattttgaggcatttcagtcagttgctcaatgtacctataaccagaccgttcagctggatattacggcctttttaaagaccgtaaagaaaaataagcacaagttttatccggcctttattcacattcttgcccgcctgatgaatgctcatccggaattccgtatggcaatgaaagacggtgagctggtgatatgggatagtgttcacccttgttacaccgttttccatgagcaaactgaaacgttttcatcgctctggagtgaataccacgacgatttccggcagtttctacacatatattcgcaagatgtggcgtgttacggtgaaaacctggcctatttccctaaagggtttattgagaatatgtttttcgtctcagccaatccctgggtgagtttcaccagttttgatttaaacgtggccaatatggacaacttcttcgcccccgttttcaccatgggcaaatattatacgcaaggcgacaaggtgctgatgccgctggcgattcaggttcatcatgccgtctgtgatggcttccatgtcggcagaatgcttaatgaattacaacagtactgcgatgagtggcagggcggggcgtaatcgcgtggatccggcttactaaaagccagataacagtatgcgtatttgcgcgctgatttttgcggtataagaatatatactgatatgtcgggcccataatagtaattctagctggtttgatgaattaaatatcaatgataaaatactatagtaaaaataagaataaataaattaaaataatatttttttatgattaatagtttattatataattaaatatctataccattactaaatattttagtttaaaagttaataaatattttgttagaaattccaatctgcttgtaatttatcaataaacaaaatattaaataacaagctaaagtaacaaataatatcaaactaatagaaacagtaatctaatgtaacaaaacataatctaatgctaatataacaaagcgcaagatctatcattttatatagtattattttcaatcaacattcttattaatttctaaataatacttgtagttttattaacttctaaatggattgactattaattaaatgaattagtcgaacatgaataaacaaggtaacatgatagatcatgtcattgtgttatcattgatcttacatttggattgattacagttgggaaattgggttcgaaatcgataagcttggatcctctagagagctgcagctggatggcaaataatgattttattttgactgatagtgacctgttcgttgcaacaaattgataagcaatgctttcttataatgccaactttgtacaagaaagctgaacgagaaacgtaaaatgatataaatatcaatatattaaattagattttgcataaaaaacagactacataatactgtaaaacacaacatatccagtcactatgaatcaactacttagatggtattagtgacctgtagtcgactaagttggcagcatcacccgacgcactttgcgccgaataaatacctgtgacggaagatcacttcgcagaataaataaatcctggtgtccctgttgataccgggaagccctgggccaacttttggcgaaaatgagacgttgatcggcactacccatttcacaactcttatacttttctcttacaagtcgttcggcttcatctggattttcagcctctatacttactaaacgtgataaagtttctgtaatttctactgtatcgacctgcagactggctgtgtataagggagcctgacatttatattccccagaacatcaggttaatggcgtttttgatgtcattttcgcggtggctgagatcagccacttcttccccgataacggagaccggcacactggccatatcggtggtcatcatgcgccagctttcatccccgatatgcaccaccgggtaaagttcacgggagactttatctgacagcagacgtgcactggccagggggatcaccatccgtcgcccgggcgtgtcaataatatcactctgtacatccacaaacagacgataacggctctctcttttataggtgtaaaccttaaactgcatttcaccagtccctgttctcgtcagcaaaagagccgttcatttcaataaaccgggcgacctcagccatcccttcctgattttccgctttccagcgttcggcacgcagacgacgggcttcattctgcatggttgtgcttaccagaccggagatattgacatcatatatgccttgagcaactgatagctgtcgctgtcaactgtcactgtaatacgctgcttcatagcacacctctttttgacatacttctgttcttgatgcagatgattttcaggactatgacactagcgtatatgaataggtagatgtttttattttgtcacacaaaaaagaggctcgcacctctttttcttatttctttttatgatttaatacggcattgaggacaatagcgagtaggctggatacgacgattccgtttgagaagaacatttggaaggctgtcggtcgactaagttggcagcatcacccgaagaacatttggaaggctgtcggtcgactacaggtcactaataccatctaagtagttgattcatagtgactggatatgttgtgttttacagtattatgtagtctgttttttatgcaaaatctaatttaatatattgatatttatatcattttacgtttctcgttcagcttttttgtacaaagttggcattataaaaaagcattgctcatcaatttgttgcaacgaacaggtcactatcagtcaaaataaaatcattatttggggcccgagatccatgctagctctagagtcctgctttaatgagatatgcgagacgcctatgatcgcatgatatttgctttcaattctgttgtgcacgttgtaaaaaacctgagcatgtgtagctcagatccttaccgccggtttcggttcattctaatgaatatatcacccgttactatcgtatttttatgaataatattctccgttcaatttactgattgtaccctactacttatatgtacaatattaaaatgaaaacaatatattgtgctgaataggtttatagcgacatctatgatagagcgccacaataacaaacaattgcgttttattattacaaatccaattttaaaaaaagcggcagaaccggtcaaacctaaaagactgattacataaatcttattcaaatttcaaaaggccccaggggctagtatctacgacacaccgagcggcgaactaataacgttcactgaagggaactccggttccccgccggcgcgcatgggtgagattccttgaagttgagtattggccgtccgctctaccgaaagttacgggcaccattcaacccggtccagcacggcggccgggtaaccgacttgctgccccgagaattatgcagcatttttttggtgtatgtgggccccaaatgaagtgcaggtcaaaccttgacagtgacgacaaatcgttgggcgggtccagggcgaattttgcgacaacatgtcgaggctcagcaggacctgcaggcatgcaagctagcttactagtgatgcatattctatagtgtcacctaaatctgc

SEQ ID NO: 1009 - DNA, 12096 bp, synthetic construct
  source 1..12096: mol_type = other DNA
aattcagtaacatagatgacaccgcgcgcgataatttatcctagtttgcgcgctatattttgttttctatcgcgtattaaatgtataattgcgggactctaatcataaaaacccatctcataaataacgtcatgcattacatgttaattattacatgcttaacgtaattcaacagaaattatatgataatcatcgcaagaccggcaacaggattcaatcttaagaaactttattgccaaatgtttgaacgatcggggaaattcgagctccaccgcggtgggcggccgctctagaactagttaattaaggaattattaccctttgatcctgaatagagcactgccatctgaaacctgttggcctgctttaactttgaggtcctgtatgcttccagaggatggtgctttcacaacgtgctccatcttcattgcctctaggactaatataggttgaccttgatctactttggcttcgttttcgacaaggaccttgactaccaaaccagccatgggggccacaatggttcctggagggtgtgatgatgtttcggagctggttggatctgcggaacccagtggaccctggaacaaaacttcgaggccaccggatgcataatcaggaacgtcataagggtaagaacctgtgcggccgccgctagctcgaaccactttgtacaagaaagctgaacgagaaacgtaaaatgatataaatatcaatatattaaattagattttgcataaaaaacagactacataatactgtaaaacacaacatatccagtcactatggtcgacctgcagactggctgtgtataagggagcctgacatttatattccccagaacatcaggttaatggcgtttttgatgtcattttcgcggtggctgagatcagccacttcttccccgataacggagaccggcacactggccatatcggtggtcatcatgcgccagctttcatccccgatatgcaccaccgggtaaagttcacgggagactttatctgacagcagacgtgcactggccagggggatcaccatccgtcgcccgggcgtgtcaataatatcactctgtacatccacaaacagacgataacggctctctcttttataggtgtaaaccttaaactgcatttcaccagtccctgttctcgtcagcaaaagagccgttcatttcaataaaccgggcgacctcagccatcccttcctgattttccgctttccagcgttcggcacgcagacgacgggcttcattctgcatggttgtgcttaccagaccggagatattgacatcatatatgccttgagcaactgatagctgtcgctgtcaactgtcactgtaatacgctgcttcatagcacacctctttttgacatacttcgggtatacatatcagtatatattcttataccgcaaaaatcagcgcgcaaatacgcatactgttatctggcttttagtaagccggatcctctagattacgccccgccctgccactcatcgcagtactgttgtaattcattaagcattctgccgacatggaagccatcacagacggcatgatgaacctgaatcgccagcggcatcagcaccttgtcgccttgcgtataatatttgcccatggtgaaaacgggggcgaagaagttgtccatattggccacgtttaaatcaaaactggtgaaactcacccagggattggctgagacgaaaaacatattctcaataaaccctttagggaaataggccaggttttcaccgtaacacgccacatcttgcgaatatatgtgtagaaactgccggaaatcgtcgtggtattcactccagagcgatgaaaacgtttcagtttgctcatggaaaacggtgtaacaagggtgaacactatcccatatcaccagctcaccgtctttcattgccatacggaattccggatgagcattcatcaggcgggcaagaatgtgaataaaggccggataaaacttgtgcttatttttctttacggtctttaaaaaggccgtaatatccagctgaacggtctggttataggtacattgagcaactgactgaaatgcctcaaaatgttctttacgatgccattgggatatatcaacggtggtatatccagtgatttttttctccattttagcttccttagctcctgaaaatctcgccggatcctaactcaaaatccacacattatacgagccggaagcataaagtgtaaagcctggggtgcctaatgcggccgccatagtgactggatatgttgtgttttacagtattatgtagtctgttttttatgcaaaatctaatttaatatattgatatttatatcattttacgtttctcgttcagcttttttgtacaaacttgtttgatagcttggcgcgcctcgagggggggcccggtacccggggatcctctagagtcgaggtcctctccaaatgaaatgaacttccttatatagaggaagggtcttgcgaaggatagtgggattgtgcgtcatcccttacgtcagtggagatatcacatcaatccacttgctttgaagacgtggttggaacgtcttctttttccacgatgctcctcgtgggtgggggtccatctttgggaccactgtcggcagaggcatcttcaacgatggcctttcctttatcgcaatgatggcatttgtaggagccaccttccttttccactatcttcacaataaagtgacagatagctgggcaatggaatccgaggaggtttccggatattaccctttgttgaaaagtctcaattgccctttggtcttctgagactgtatctttgatatttttggagtagacaagtgtgtcgtgctccaccatgttatcacatcaatccacttgctttgaagacgtggttggaacgtcttctttttccacgatgctcctcgtgggtgggggtccatctttgggaccactgtcggcagaggcatcttcaacgatggcctttcctttatcgcaatgatggcatttgtaggagccaccttccttttccactatcttcacaataaagtgacagatagctgggcaatggaatccgaggaggtttccggatattaccctttgttgaaaagtctcaattgccctttggtcttctgagactgtatctttgatatttttggagtagacaagtgtgtcgtgctccaccatgttgacctgcaggcacgccaagcttggcactggccgtcgttttacaacgtcgtgactgggaaaaccctggcgttacccaacttaatcgccttgcagcacatccccctttcgccagctggcgtaatagcgaagaggcccgcaccgatcgcccttcccaacagttgcgcagcctgaatggcgaatgctagagcagcttgagcttggatcagattgtcgtttcccgccttcagtttaaactatcagtgtttgacaggatatattggcgggtaaacctaagagaaaagagcgtttattagaataacggatatttaaaagggcgtgaaaaggtttatccgttcgtccatttgtatgtgcatgccaaccacagggttcccctcgggatcaaagtactttgatccaacccctccgctgctatagtgcagtcggcttctgacgttcagtgcagccgtcttctgaaaacgacatgtcgcacaagtcctaagttacgcgacaggctgccgccctgcccttttcctggcgttttcttgtcgcgtgttttagtcgcataaagtagaatacttgcgactagaaccggagacattacgccatgaacaagagcgccgccgctggcctgctgggctatgcccgcgtcagcaccgacgaccaggacttgaccaaccaacgggccgaactgcacgcggccggctgcaccaagctgttttccgagaagatcaccggcaccaggcgcgaccgcccggagctggccaggatgcttgaccacctacgccctggcgacgttgtgacagtgaccaggctagaccgcctggcccgcagcacccgcgacctactggacattgccgagcgcatccaggaggccggcgcgggcctgcgtagcctggcagagccgtgggccgacaccaccacgccggccggccgcatggtgttgaccgtgttcgccggcattgccgagttcgagcgttccctaatcatcgaccgcacccggagcgggcgcgaggccgccaaggcccgaggcgtgaagtttggcccccgccctaccctcaccccggcacagatcgcgcacgcccgcgagctgatcgaccaggaaggccgcaccgtgaaagaggcggctgcactgcttggcgtgcatcgctcgaccctgtaccgcgcacttgagcgcagcgaggaagtgacgcccaccgaggccaggcggcgcggtgccttccgtgaggacgcattgaccgaggccgacgccctggcggccgccgagaatgaacgccaagaggaacaagcatgaaaccgcaccaggacggccaggacgaaccgtttttcattaccgaagagatcgaggcggagatgatcgcggccgggtacgtgttcgagccgcccgcgcacgtctcaaccgtgcggctgcatgaaatcctggccggtttgtctgatgccaagctggcggcctggccggccagcttggccgctgaagaaaccgagcgccgccgtctaaaaaggtgatgtgtatttgagtaaaacagcttgcgtcatgcggtcgctgcgtatatgatgcgatgagtaaataaacaaatacgcaaggggaacgcatgaaggttatcgctgtacttaaccagaaaggcgggtcaggcaagacgaccatcgcaacccatctagcccgcgccctgcaactcgccggggccgatgttctgttagtcgattccgatccccagggcagtgcccgcgattgggcggccgtgcgggaagatcaaccgctaaccgttgtcggcatcgaccgcccgacgattgaccgcgacgtgaaggccatcggccggcgcgacttcgtagtgatcgacggagcgccccaggcggcggacttggctgtgtccgcgatcaaggcagccgacttcgtgctgattccggtgcagccaagcccttacgacatatgggccaccgccgacctggtggagctggttaagcagcgcattgaggtcacggatggaaggctacaagcggcctttgtcgtgtcgcgggcgatcaaaggcacgcgcatcggcggtgaggttgccgaggcgctggccgggtacgagctgcccattcttgagtcccgtatcacgcagcgcgtgagctacccaggcactgccgccgccggcacaaccgttcttgaatcagaacccgagggcgacgctgcccgcgaggtccaggcgctggccgctgaaattaaatcaaaactcatttgagttaatgaggtaaagagaaaatgagcaaaagcacaaacacgctaagtgccggccgtccgagcgcacgcagcagcaaggctgcaacgttggccagcctggcagacacgccagccatgaagcgggtcaactttcagttgccggcggaggatcacaccaagctgaagatgtacgcggtacgccaaggcaagaccattaccgagctgctatctgaatacatcgcgcagctaccagagtaaatgagcaaatgaataaatgagtagatgaattttagcggctaaaggaggcggcatggaaaatcaagaacaaccaggcaccgacgccgtggaatgccccatgtgtggaggaacgggcggttggccaggcgtaagcggctgggttgtctgccggccctgcaatggcactggaacccccaagcccgaggaatcggcgtgacggtcgcaaaccatccggcccggtacaaatcggcgcggcgctgggtgatgacctggtggagaagttgaaggccgcgcaggccgcccagcggcaacgcatcgaggcagaagcacgccccggtgaatcgtggcaagcggccgctgatcgaatccgcaaagaatcccggcaaccgccggcagccggtgcgccgtcgattaggaagccgcccaagggcgacgagcaaccagattttttcgttccgatgctctatgacgtgggcacccgcgatagtcgcagcatcatggacgtggccgttttccgtctgtcgaagcgtgaccgacgagctggcgaggtgatccgctacgagcttccagacgggcacgtagaggtttccgcagggccggccggcatggccagtgtgtgggattacgacctggtactgatggcggtttcccatctaaccgaatccatgaaccgataccgggaagggaagggagacaagcccggccgcgtgttccgtccacacgttgcggacgtactcaagttctgccggcgagccgatggcggaaagcagaaagacgacctggtagaaacctgcattcggttaaacaccacgcacgttgccatgcagcgtacgaagaaggccaagaacggccgcctggtgacggtatccgagggtgaagccttgattagccgctacaagatcgtaaagagcgaaaccgggcggccggagtacatcgagatcgagctagctgattggatgtaccgcgagatcacagaaggcaagaacccggacgtgctgacggttcaccccgattactttttgatcgatcccggcatcggccgttttctctaccgcctggcacgccgcgccgcaggcaaggcagaagccagatggttgttcaagacgatctacgaacgcagtggcagcgccggagagttcaagaagttctgtttcaccgtgcgcaagctgatcgggtcaaatgacctgccggagtacgatttgaaggaggaggcggggcaggctggcccgatcctagtcatgcgctaccgcaacctgatcgagggcgaagcatccgccggttcctaatgtacggagcagatgctagggcaaattgccctagcaggggaaaaaggtcgaaaaggtctctttcctgtggatagcacgtacattgggaacccaaagccgtacattgggaaccggaacccgtacattgggaacccaaagccgtacattgggaaccggtcacacatgtaagtgactgatataaaagagaaaaaaggcgatttttccgcctaaaactctttaaaacttattaaaactcttaaaacccgcctggcctgtgcataactgtctggccagcgcacagccgaagagctgcaaaaagcgcctacccttcggtcgctgcgctccctacgccccgccgcttcgcgtcggcctatcgcggccgctggccgctcaaaaatggctggcctacggccaggcaatctaccagggcgcggacaagccgcgccgtcgccactcgaccgccggcgcccacatcaaggcaccctgcctcgcgcgtttcggtgatgacggtgaaaacctctgacacatgcagctcccggagacggtcacagcttgtctgtaagcggatgccgggagcagacaagcccgtcagggcgcgtcagcgggtgttggcgggtgtcggggcgcagccatgacccagtcacgtagcgatagcggagtgtatactggcttaactatgcggcatcagagcagattgtactgagagtgcaccatatgcggtgtgaaataccgcacagatgcgtaaggagaaaataccgcatcaggcgctcttccgcttcctcgctcactgactcgctgcgctcggtcgttcggctgcggcgagcggtatcagctcactcaaaggcggtaatacggttatccacagaatcaggggataacgcaggaaagaacatgtgagcaaaaggccagcaaaaggccaggaaccgtaaaaaggccgcgttgctggcgtttttccataggctccgcccccctgacgagcatcacaaaaatcgacgctcaagtcagaggtggcgaaacccgacaggactataaagataccaggcgtttccccctggaagctccctcgtgcgctctcctgttccgaccctgccgcttaccggatacctgtccgcctttctcccttcgggaagcgtggcgctttctcatagctcacgctgtaggtatctcagttcggtgtaggtcgttcgctccaagctgggctgtgtgcacgaaccccccgttcagcccgaccgctgcgccttatccggtaactatcgtcttgagtccaacccggtaagacacgacttatcgccactggcagcagccactggtaacaggattagcagagcgaggtatgtaggcggtgctacagagttcttgaagtggtggcctaactacggctacactagaaggacagtatttggtatctgcgctctgctgaagccagttaccttcggaaaaagagttggtagctcttgatccggcaaacaaaccaccgctggtagcggtggtttttttgtttgcaagcagcagattacgcgcagaaaaaaaggatctcaagaagatcctttgatcttttctacggggtctgacgctcagtggaacgaaaactcacgttaagggattttggtcatgcattctaggtactaaaacaattcatccagtaaaatataatattttattttctcccaatcaggcttgatccccagtaagtcaaaaaatagctcgacatactgttcttccccgatatcctccctgatcgaccggacgcagaaggcaatgtcataccacttgtccgccctgccgcttctcccaagatcaataaagccacttactttgccatctttcacaaagatgttgctgtctcccaggtcgccgtgggaaaagacaagttcctcttcgggcttttccgtctttaaaaaatcatacagctcgcgcggatctttaaatggagtgtcttcttcccagttttcgcaatccacatcggccagatcgttattcagtaagtaatccaattcggctaagcggctgtctaagctattcgtatagggacaatccgatatgtcgatggagtgaaagagcctgatgcactccgcatacagctcgataatcttttcagggctttgttcatcttcatactcttccgagcaaaggacgccatcggcctcactcatgagcagattgctccagccatcatgccgttcaaagtgcaggacctttggaacaggcagctttccttccagccatagcatcatgtccttttcccgttccacatcataggtggtccctttataccggctgtccgtcatttttaaatataggttttcattttctcccaccagcttatataccttagcaggagacattccttccgtatcttttacgcagcggtatttttcgatcagttttttcaattccggtgatattctcattttagccatttattatttccttcctcttttctacagtatttaaagataccccaagaagctaattataacaagacgaactccaattcactgttccttgcattctaaaaccttaaataccagaaaacagctttttcaaagttgttttcaaagttggcgtataacatagtatcgacggagccgattttgaaaccgcggtgatcacaggcagcaacgctctgtcatcgttacaatcaacatgctaccctccgcgagatcatccgtgtttcaaacccggcagcttagttgccgttcttccgaatagcatcggtaacatgagcaaagtctgccgccttacaacggctctcccgctgacgccgtcccggactgatgggctgcctgtatcgagtggtgattttgtgccgagctgccggtcggggagctgttggctggctggtggcaggatatattgtggtgtaaacaaattgacgcttagacaacttaataacacattgcggacgtttttaatgtactgaattaacgccgaattaattcgggggatctggattttagtactggattttggttttaggaattagaaattttattgatagaagtattttacaaatacaaatacatactaagggtttcttatatgctcaacacatgagcgaaaccctataggaaccctaattcccttatctgggaactactcacacattattatggagaaactcgagcttgtcgatcgacagatccggtcggcatctactctatttctttgccctcggacgagtgctggggcgtcggtttccactatcggcgagtacttctacacagccatcggtccagacggccgcgcttctgcgggcgatttgtgtacgcccgacagtcccggctccggatcggacgattgcgtcgcatcgaccctgcgcccaagctgcatcatcgaaattgccgtcaaccaagctctgatagagttggtcaagaccaatgcggagcatatacgcccggagtcgtggcgatcctgcaagctccggatgcctccgctcgaagtagcgcgtctgctgctccatacaagccaaccacggcctccagaagaagatgttggcgacctcgtattgggaatccccgaacatcgcctcgctccagtcaatgaccgctgttatgcggccattgtccgtcaggacattgttggagccgaaatccgcgtgcacgaggtgccggacttcggggcagtcctcggcccaaagcatcagctcatcgagagcctgcgcgacggacgcactgacggtgtcgtccatcacagtttgccagtgatacacatggggatcagcaatcgcgcatatgaaatcacgccatgtagtgtattgaccgattccttgcggtccgaatgggccgaacccgctcgtctggctaagatcggccgcagcgatcgcatccatagcctccgcgaccggttgtagaacagcgggcagttcggtttcaggcaggtcttgcaacgtgacaccctgtgcacggcgggagatgcaataggtcaggctctcgctaaactccccaatgtcaagcacttccggaatcgggagcgcggccgatgcaaagtgccgataaacataacgatctttgtagaaaccatcggcgcagctatttacccgcaggacatatccacgccctcctacatcgaagctgaaagcacgagattcttcgccctccgagagctgcatcaggtcggagacgctgtcgaacttttcgatcagaaacttctcgacagacgtcgcggtgagttcaggctttttcatatctcattgccccccgggatctgcgaaagctcgagagagatagatttgtagagagagactggtgatttcagcgtgtcctctccaaatgaaatgaacttccttatatagaggaaggtcttgcgaaggatagtgggattgtgcgtcatcccttacgtcagtggagatatcacatcaatccacttgctttgaagacgtggttggaacgtcttctttttccacgatgctcctcgtgggtgggggtccatctttgggaccactgtcggcagaggcatcttgaacgatagcctttcctttatcgcaatgatggcatttgtaggtgccaccttccttttctactgtccttttgatgaagtgacagatagctgggcaatggaatccgaggaggtttcccgatattaccctttgttgaaaagtctcaatagccctttggtcttctgagactgtatctttgatattcttggagtagacgagagtgtcgtgctccaccatgttatcacatcaatccacttgctttgaagacgtggttggaacgtcttctttttccacgatgctcctcgtgggtgggggtccatctttgggaccactgtcggcaaggcatcttgaacgatagcctttcctttatcgcaatgatggcatttgtaggtgccaccttccttttctactgtccttttgatgaagtgacagatagctgggcaatggaatccgaggaggtttcccgatattaccctttgttgaaaagtctcaatagccctttggtcttctgagactgtatctttgatattcttggagtagacgagagtgtcgtgctccaccatgttggcaagctgctctagccaatacgcaaaccgcctctccccgcgcgttggccgattcattaatgcagctggcacgacaggtttcccgactggaaagcgggcagtgagcgcaacgcaattaatgtgagttagctcactcattaggcaccccaggctttacactttatgcttccggctcgtatgttgtgtggaattgtgagcggataacaatttcacacaggaaacagctatgaccatgattacg
